(19) United States
(12) Patent Application Publication
(10) Pub. No.: US 2025/0351831 A1
(43) Pub. Date: Nov. 20, 2025

(54) ENDOPHYTE COMPOSITIONS AND METHODS FOR IMPROVED PLANT HEALTH

(71) Applicant: INDIGO AG, INC., Charlestown, MA (US)

(72) Inventors: Shib Sankar BASU, Apex, NC (US); David A. HUBERT, Durham, NC (US); Sara B. COLLINS, Swampscott, MA (US); Brandon M. SATINSKY, Brookline, MA (US)

(21) Appl. No.: 18/717,145

(22) PCT Filed: Dec. 7, 2022
(86) PCT No.: PCT/US2022/081127

§ 371 Date: Jun. 6, 2024

Related U.S. Application Data
(60) Provisional application No. 63/265,091, filed on Dec. 7, 2021.

(51) Int. Cl. A01N 63/20; A01P 21/00; C12N 1/20; C12R 1/01

(52) U.S. Cl. CPC A01N 63/20; A01P 21/00; C12N 1/20; C12R 2001/01

(57) ABSTRACT

This invention relates to compositions and methods for improving plant health, including treatment formulations plant comprising one or more endophytes.

### CROSS REFERENCE TO RELATED APPLICATIONS

[0001] This application is a U.S. National Phase Application under 35 U.S.C. § 371 of International Application No. PCT/US2022/081127 filed Dec. 7, 2022, which claims the benefit of U.S. Provisional Application No. 63/265,091, filed Dec. 7, 2021, which are hereby incorporated by reference in their entirety.

### SEQUENCE LISTING

[0002] The instant application contains a Sequence Listing which has been submitted via the USPTO Patent Center and is hereby incorporated by reference in its entirety. Said XML copy, created on Dec. 23, 2024, is named 10242PCTWO1_Sequence_Listing_Updated_2024-12-23.xml, and is 3,175,846 bytes in size.

### BACKGROUND

[0003] According to the United Nations Food and Agriculture Organization, the world's population will exceed 9.6 billion people by the year 2050, which will require significant improvements in agriculture to meet growing food demands. There is a need for improved methods and agricultural plants that will enable a near doubling of food production with fewer resources and more environmentally sustainable inputs, and for plants with improved responses to various stresses.

### SUMMARY OF INVENTION

[0004] Disclosed herein are methods of improving plant health, comprising heterologously disposing one or more endophytes to a plant element in an effective amount to improve a trait of agronomic importance in a plant derived from the treated plant element relative to a reference plant derived from a reference plant element, wherein the one or more endophytes comprise at least one tailocin gene cluster. In some embodiments, the tailocin gene cluster comprises one or more polynucleotide sequences at least 97% identical to one or more of SEQ ID NOs. 287-933. In some embodiments, the tailocin gene cluster comprises one or more polynucleotide sequences at least 97% identical to one or more of SEQ ID NOs. 287-289. In some embodiments, the tailocin gene cluster comprises one or more polynucleotide sequences at least 97% identical to one or more of SEQ ID NOs. 290-343. In some embodiments, the tailocin gene cluster comprises one or more polynucleotide sequences at least 97% identical to one or more of SEQ ID NOs. 375-452. In some embodiments, the one or more endophytes comprise a plasmid comprising one or more polynucleotide sequences at least 97% identical to one or more of SEQ ID NOs. 287-933. Optionally, the one or more endophytes are capable of producing one or more proteins whose amino acid sequences are selected from SEQ ID NOs. 1318-1922. Optionally, the one or more endophytes are capable of producing one or more proteins whose amino acid sequences are selected from SEQ ID NOs. 1318-1321. Optionally, the one or more endophytes are capable of producing one or more proteins whose amino acid sequences are selected from SEQ ID NOs. 1322-1342. In some embodiments, the one or more endophytes comprise a plasmid comprising an open reading frame encoding a protein whose amino acid sequence is selected from SEQ ID 1318-1922. In some embodiments, the one or more endophytes comprise one or more polynucleotide sequences at least 97% identical to one or more of SEQ ID NOs. 287-933, and the one or more endophytes are capable of producing one or more proteins whose amino acid sequences are selected from SEQ ID NOs. 1318-1922. In some embodiments the trait of agronomic importance is biotic stress tolerance, for example biotic stress tolerance is increased early emergence, increased emergence, increased plant height, increased root weight, and or increased shoot weight, in a growth environment comprising one or more pests or pathogens. In some embodiments, the pathogen is of the genus Dreschlera, Bipolaris, Pythium, Rhizoctonia, and or Fusarium. In some embodiments, the plant element is a seed of a cereal plant. In some embodiments, the plant element is a seed of a corn plant. In some embodiments, the plant element is a seed of a winter wheat plant. In some embodiments, the plant element is a seed of a soybean plant.

[0005] Disclosed herein are methods of improving plant health, comprising heterologously disposing one or more endophytes to a plant element in an effective amount to improve a trait of agronomic importance in a plant derived from the treated plant element relative to a reference plant derived from a reference plant element, wherein the one or more endophytes comprise at least one gene of a Type VI secretion system and the gene polynucleotide sequence is at least 97% identical to one or more of SEQ ID NOs. 934-1014. In some embodiments, the Type VI secretion system comprises one or more polynucleotide sequences at least 97% identical to one or more of SEQ ID NOs. 934-941. In some embodiments, the Type VI secretion system comprises one or more polynucleotide sequences at least 97% identical to one or more of SEQ ID NOs. 942-962. In some embodiments, the one or more endophytes comprise a plasmid comprising one or more polynucleotide sequences at least 97% identical to one or more of SEQ ID NOs. 934-1014. Optionally, the one or more endophytes are capable of producing one or more proteins whose amino acid sequences are selected from SEQ ID NOs. 1923-1981. Optionally, the one or more endophytes are capable of producing one or more proteins whose amino acid sequences are selected from SEQ ID NOs. 1923-1930. Optionally, the one or more endophytes are capable of producing one or more proteins whose amino acid sequences are selected from SEQ ID NOs. 1931-1947. In some embodiments, the one or more endophytes comprise at least one gene of a Type VI secretion system and the gene polynucleotide sequence is at least 97% identical to one or more of SEQ ID NOs. 934-1014, and the one or more endophytes are capable of producing one or more proteins whose amino acid sequences are selected from SEQ ID NOs. 1923-1981. In some embodiments, the one or more endophytes comprise a plasmid comprising an open reading frame encoding a protein whose amino acid sequence is selected from SEQ IDs. 1923-1981. In some embodiments the trait of agronomic importance is biotic stress tolerance, for example biotic stress tolerance is increased early emergence, increased emergence, increased plant height, increased root weight, and or increased shoot weight, in a growth environment comprising one or more pests or pathogens. In some embodiments, the pathogen is of the genus Dreschlera, Bipolaris, Pythium, Rhizoctonia, and or Fusarium. In some embodiments, the plant element is a seed of a cereal plant. In some embodiments, the plant element is a seed of a corn plant. In some embodiments, the plant element is a seed of a winter wheat plant. In some embodiments, the plant element is a seed of a soybean plant.

[0006] Disclosed herein are methods of improving plant health, comprising heterologously disposing one or more endophytes to a plant element in an effective amount to improve a trait of agronomic importance in a plant derived from the treated plant element relative to a reference plant derived from a reference plant element, wherein the one or more endophytes comprise at least one Type VI secretion system putative effector gene and the gene polynucleotide sequence is at least 97% identical to one or more of SEQ ID NOs. 1015-1089. In some embodiments, the Type VI secretion system putative effector comprises one or more polynucleotide sequences at least 97% identical to one or more of SEQ ID NOs. 1015-1022. In some embodiments, the one or more endophytes comprise a plasmid comprising one or more polynucleotide sequences at least 97% identical to one or more of SEQ ID NOs. 1015-1089. Optionally, the one or more endophytes are capable of producing one or more proteins whose amino acid sequences are selected from SEQ ID NOs. 1982-2051. Optionally, the one or more endophytes are capable of producing one or more proteins whose amino acid sequences are selected from SEQ ID NOs. 1982-1989. In some embodiments, the one or more endophytes comprise at least one Type VI secretion system putative effector gene and the gene polynucleotide sequence is at least 97% identical to one or more of SEQ ID NOs. 1015-1089, and the one or more endophytes are capable of producing one or more proteins whose amino acid sequences are selected from SEQ ID NOs. 1982-2051. In some embodiments, the one or more endophytes comprise a plasmid comprising an open reading frame encoding a protein whose amino acid sequence is selected from SEQ IDs. 1982-2051. In some embodiments the trait of agronomic importance is biotic stress tolerance, for example biotic stress tolerance is increased early emergence, increased emergence, increased plant height, increased root weight, and or increased shoot weight, in a growth environment comprising one or more pests or pathogens. In some embodiments, the pathogen is of the genus Dreschlera, Bipolaris, Pythium, Rhizoctonia, and or Fusarium. In some embodiments, the plant element is a seed of a cereal plant. In some embodiments, the plant element is a seed of a corn plant. In some embodiments, the plant element is a seed of a winter wheat plant. In some embodiments, the plant element is a seed of a soybean plant.

[0007] Disclosed herein are methods of improving plant health, comprising heterologously disposing one or more endophytes to a plant element in an effective amount to improve a trait of agronomic importance in a plant derived from the treated plant element relative to a reference plant derived from a reference plant element, wherein the one or more endophytes comprise at least one flagellin gene at least 97% identical to one or more of SEQ ID NOs. 1-239. In some embodiments, the endophyte comprises one or more polynucleotide sequences at least 97% identical to one or more of SEQ IDs. 1-23. In some embodiments, the endophyte comprises one or more polynucleotide sequences at least 97% identical to one or more of SEQ IDs. 14-28. In some embodiments, the one or more endophytes comprise a plasmid comprising a polynucleotide sequence at least 97% identical to one or more of SEQ ID NOs. 1-239. Optionally, the one or more endophytes are capable of producing one or more proteins whose amino acid sequences are selected from SEQ ID NOs. 1090-1272. Optionally, the one or more endophytes are capable of producing one or more proteins whose amino acid sequences are selected from SEQ ID NOs. 1090-1106. Optionally, the one or more endophytes are capable of producing one or more proteins whose amino acid sequences are selected from SEQ ID NOs. 1107-1114. In some embodiments, the one or more endophytes comprise at least one flagellin gene at least 97% identical to one or more of SEQ ID NOs. 1-239, and the one or more endophytes are capable of producing one or more proteins whose amino acid sequences are selected from SEQ ID NOs. 1090-1272. In some embodiments, the one or more endophytes comprise a plasmid comprising an open reading frame encoding a protein whose amino acid sequence is selected from SEQ IDs. 1090-1272. In some embodiments the trait of agronomic importance is biotic stress tolerance, for example biotic stress tolerance is increased early emergence, increased emergence, increased plant height, increased root weight, and or increased shoot weight, in a growth environment comprising one or more pests or pathogens. In some embodiments, the pathogen is Dreschlera, Bipolaris, Pythium, Rhizoctonia, and or Fusarium. In some embodiments, the plant element is a seed of a cereal plant. In some embodiments, the plant element is a seed of a corn plant. In some embodiments, the plant element is a seed of a winter wheat plant. In some embodiments, the plant element is a seed of a soybean plant.

[0008] Disclosed herein are methods of improving plant health, comprising heterologously disposing one or more endophytes to a plant element in an effective amount to improve a trait of agronomic importance in a plant derived from the treated plant element relative to a reference plant derived from a reference plant element, wherein the one or more endophytes comprise at least one O-antigen biosynthesis gene at least 97% identical to one or more of SEQ ID NOs. 240-253. In some embodiments, the one or more endophytes comprise at least one O-antigen biosynthesis gene at least 97% identical to one or more of SEQ ID NOs. 240-243. Optionally, the one or more endophytes are capable of producing one or more proteins whose amino acid sequences are selected from SEQ ID NOs. 1273-1285. In some embodiments, the one or more endophytes comprise at least one O-antigen biosynthesis gene at least 97% identical to one or more of SEQ ID NOs. 240-253, and the one or more endophytes are capable of producing one or more proteins whose amino acid sequences are selected from SEQ ID NOs. 1273-1285. In some embodiments the trait of agronomic importance is biotic stress tolerance, for example biotic stress tolerance is increased early emergence, increased emergence, increased plant height, increased root weight, and or increased shoot weight, in a growth environment comprising one or more pests or pathogens. In some embodiments, the pathogen is Dreschlera, Bipolaris, Pythium, Rhizoctonia, and or Fusarium. In some embodiments, the plant element is a seed of a cereal plant. In some embodiments, the plant element is a seed of a corn plant. In some embodiments, the plant element is a seed of a winter wheat plant. In some embodiments, the plant element is a seed of a soybean plant.

[0009] Disclosed herein are methods of improving plant health, comprising heterologously disposing one or more endophytes to a plant element in an effective amount to improve a trait of agronomic importance in a plant derived from the treated plant element relative to a reference plant derived from a reference plant element, wherein the one or more endophytes comprise at least one pseudaminic acid biosynthesis gene at least 97% identical to one or more of SEQ ID NOs. 254-286. In some embodiments, the one or more endophytes comprise at least one pseudaminic acid biosynthesis gene at least 97% identical to one or more of SEQ ID NOs. 254-262. Optionally, the one or more endophytes are capable of producing one or more proteins whose amino acid sequences are selected from SEQ ID NOs. 1286-1317. In some embodiments, the one or more endophytes comprise at least one pseudaminic acid biosynthesis gene at least 97% identical to one or more of SEQ ID NOs. 254-286, and the one or more endophytes are capable of producing one or more proteins whose amino acid sequences are selected from SEQ ID NOs. 1286-1317. In some embodiments the trait of agronomic importance is biotic stress tolerance, for example biotic stress tolerance is increased early emergence, increased emergence, increased plant height, increased root weight, and or increased shoot weight, in a growth environment comprising one or more pests or pathogens. In some embodiments, the pathogen is Dreschlera, Bipolaris, Pythium, Rhizoctonia, and or Fusarium. In some embodiments, the plant element is a seed of a cereal plant. In some embodiments, the plant element is a seed of a corn plant. In some embodiments, the plant element is a seed of a winter wheat plant. In some embodiments, the plant element is a seed of a soybean plant.

[0010] In some embodiments, the method additionally comprises the step of placing the plant element in or on a growth medium. In some embodiments, the one or more endophytes are heterologously disposed to a plant element prior to placing the treated plant element in or on a growth medium. In some embodiments, the one or more endophytes are heterologously disposed to a plant element after placing the plant elements in or on a growth medium. In some embodiments, the one or more endophytes are heterologously disposed to a plant element concurrently with placing the plant elements in or on a growth medium.

[0011] In some embodiments, the one or more endophytes are heterologously disposed to a plant element at least two times. In some embodiments, the one or more endophytes are heterologously disposed to a plant element via a seed treatment or soil pre-treatment and one or more foliar applications. In some embodiments, the one or more endophytes are heterologously disposed to a plant element via a seed treatment or soil pre-treatment and one or more floral applications. In some embodiments, the one or more endophytes are heterologously disposed to a plant element via one or more seed treatments or soil pre-treatments, one or more foliar applications, and one or more floral applications. In some embodiments, the one or more endophytes are heterologously disposed to a plant element via seed treatment, root wash, seedling soak, foliar application, floral application, soil inoculum, in-furrow application, sidedress application, soil pre-treatment, wound inoculation, drip tape irrigation, vector-mediation inoculation, injection, osmopriming, hydroponics, aquaponics, aeroponics, or combinations thereof.

[0012] In some embodiments, the one or more endophytes are heterologously disposed to a plant element of a different plant variety from the variety of the plant element from which the one or more endophytes were obtained. In some embodiments, the one or more endophytes are heterologously disposed to a plant element of the same plant variety as the variety of the plant element from which the one or more endophytes were obtained. In some embodiments, the one or more endophytes are heterologously disposed to a plant element of a different plant species from the species of the plant element from which the one or more endophytes were obtained. In some embodiments, the one or more endophytes are heterologously disposed to a plant element of the same plant species as the species of the plant element from which the one or more endophytes were obtained.

[0013] In some embodiments, the plant elements are allowed to germinate. In some embodiments, the plant elements are grown to yield.

[0014] In another aspect, disclosed herein are synthetic compositions, comprising one or more endophytes heterologously disposed to a treatment formulation, wherein the one or more endophytes comprise at comprise at least one tailocin gene cluster.

[0015] In another aspect, disclosed herein are synthetic compositions, comprising one or more endophytes heterologously disposed to a treatment formulation, wherein the one or more endophytes comprise at least one polynucleotide sequence that is at least 97% identical to one or more of SEQ ID NOs. 1-1089. Optionally, the one or more endophytes are capable of producing one or more proteins whose amino acid sequences are selected from SEQ ID NOs. 1090-2051. In some embodiments, the composition additionally comprises a plant element. In some embodiments, the one or more endophytes are capable of improving a trait of agronomic importance in a plant derived from the plant element (for example, when grown from a treated seed) relative to a plant derived from a reference plant element. In some embodiments, the plant element is a dicot. In some embodiments, the plant element is a monocot.

[0016] In some embodiments synthetic compositions, comprise one or more endophytes heterologously disposed to a treatment formulation, wherein the one or more endophytes comprise at least one gene of a tailocin gene cluster and the tailocin gene polynucleotide sequence is at least 97% identical to one or more of SEQ ID NOs. 287-933. In some embodiments, the one or more endophytes comprise at least one gene of a tailocin gene cluster and the tailocin gene polynucleotide sequence is at least 97% identical to one or more of SEQ ID NOs. 287-289. In some embodiments, the one or more endophytes comprise at least one gene of a tailocin gene cluster and the tailocin gene polynucleotide sequence is at least 97% identical to one or more of SEQ ID NOs. 290-343. In some embodiments, the one or more endophytes comprise at least one gene of a tailocin gene cluster and the tailocin gene polynucleotide sequence is at least 97% identical to one or more of SEQ ID NOs. 344-374. In some embodiments, the one or more endophytes comprise at least one gene of a tailocin gene cluster and the tailocin gene polynucleotide sequence is at least 97% identical to one or more of SEQ ID NOs. 375-452. In some embodiments the one or more endophytes are genetically modified to comprise a polynucleotide sequence selected from the group consisting of SEQ ID NOs. 287-933. In some embodiments the one or more endophytes are genetically modified to comprise a polynucleotide sequence selected from the group consisting of SEQ ID NOs. 287-289. In some embodiments the one or more endophytes are genetically modified to comprise a polynucleotide sequence selected from the group consisting of SEQ ID NOs. 290-343. In some embodiments the one or more endophytes are genetically modified to comprise a polynucleotide sequence selected from the group consisting of SEQ ID Nos. 344-374. In some embodiments the one or more endophytes are genetically modified to comprise a polynucleotide sequence selected from the group consisting of SEQ ID NOs. 375-452. In some embodiments the one or more endophytes is genetically modified to produce one or more proteins whose amino acid sequences are selected from SEQ ID NOs. 1318-1922. In some embodiments the one or more endophytes is genetically modified to produce one or more proteins whose amino acid sequences are selected from SEQ ID NOs. 1318-1321. In some embodiments the one or more endophytes is genetically modified to produce one or more proteins whose amino acid sequences are selected from SEQ ID NOs. 1322-1342. In some embodiments, the synthetic composition further comprises a plant element. In some embodiments, the plant element is a seed of a dicot plant. In some embodiments, the plant element is a seed of a monocot plant.

[0017] In some embodiments synthetic compositions, comprise one or more endophytes heterologously disposed to a treatment formulation, wherein the one or more endophytes comprise at least one gene of a Type VI secretion system and the gene polynucleotide sequence is at least 97% identical to one or more of SEQ ID NOs. 934-1014. In some embodiments, the one or more endophytes are capable of producing one or more proteins whose amino acid sequences are selected from SEQ ID NOs. 1923-1981. In some embodiments the one or more endophytes are genetically modified to comprise a polynucleotide sequence selected from the group consisting of SEQ ID NOs. 934-1014. In some embodiments the one or more endophytes is genetically modified to produce one or more proteins whose amino acid sequences are selected from SEQ ID NOs. 1923-1981. In some embodiments, the synthetic composition further comprises a plant element. In some embodiments, the plant element is a seed of a dicot plant. In some embodiments, the plant element is a seed of a monocot plant.

[0018] In some embodiments synthetic compositions, comprise one or more endophytes heterologously disposed to a treatment formulation, wherein the one or more endophytes comprise at least one Type VI secretion system putative effector gene and the gene polynucleotide sequence is at least 97% identical to one or more of SEQ ID NOs. 1015-1089. In some embodiments, the one or more endophytes are capable of producing one or more proteins whose amino acid sequences are selected from SEQ ID NOs. 1982-2051. In some embodiments the one or more endophytes are genetically modified to comprise a polynucleotide sequence selected from the group consisting of SEQ ID NOs. 1015-1089. In some embodiments the one or more endophytes is genetically modified to produce one or more proteins whose amino acid sequences are selected from SEQ ID NOs. 1982-2051. In some embodiments, the synthetic composition further comprises a plant element. In some embodiments, the plant element is a seed of a dicot plant. In some embodiments, the plant element is a seed of a monocot plant.

[0019] In some embodiments synthetic compositions, comprise one or more endophytes heterologously disposed to a treatment formulation, wherein the one or more endophytes comprise at least one flagellin gene at least 97% identical to one or more of SEQ ID NOs. 1-239. In some embodiments, the one or more endophytes are capable of producing one or more proteins whose amino acid sequences are selected from SEQ ID NOs. 1090-1272. In some embodiments the one or more endophytes are genetically modified to comprise a polynucleotide sequence selected from the group consisting of SEQ ID NOs. 1-239. In some embodiments the one or more endophytes is genetically modified to produce one or more proteins whose amino acid sequences are selected from SEQ ID NOs. 1090-1272 and combinations thereof. In some embodiments, the synthetic composition further comprises a plant element. In some embodiments, the plant element is a seed of a dicot plant. In some embodiments, the plant element is a seed of a monocot plant.

[0020] In some embodiments synthetic compositions, comprise one or more endophytes heterologously disposed to a treatment formulation, wherein the one or more endophytes comprise at least one O-antigen biosynthesis gene at least 97% identical to one or more of SEQ ID NOs. 240-253. In some embodiments, the one or more endophytes are capable of producing one or more proteins whose amino acid sequences are selected from SEQ ID NOs. 1273-1285. In some embodiments the one or more endophytes are genetically modified to comprise a polynucleotide sequence selected from the group consisting of SEQ ID NOs. 240-253. In some embodiments the one or more endophytes is genetically modified to produce one or more proteins whose amino acid sequences are selected from SEQ ID NOs. 1273-1285. In some embodiments, the synthetic composition further comprises a plant element. In some embodiments, the plant element is a seed of a dicot plant. In some embodiments, the plant element is a seed of a monocot plant.

[0021] In some embodiments synthetic compositions, comprise one or more endophytes heterologously disposed to a treatment formulation, wherein the one or more endophytes comprise at least one pseudaminic acid biosynthesis gene at least 97% identical to one or more of SEQ ID NOs. 254-286. In some embodiments, the one or more endophytes are capable of producing one or more proteins whose amino acid sequences are selected from SEQ ID NOs. 1286-1317. In some embodiments the one or more endophytes are genetically modified to comprise a polynucleotide sequence selected from the group consisting of SEQ ID NOs. 254-286. In some embodiments the one or more endophytes is genetically modified to produce one or more proteins whose amino acid sequences are selected from SEQ ID NOs. 1286-1317. In some embodiments, the synthetic composition further comprises a plant element. In some embodiments, the plant element is a seed of a dicot plant. In some embodiments, the plant element is a seed of a monocot plant.

[0022] In some embodiments, a synthetic composition comprises one or more endophytes heterologously disposed to a treatment formulation, wherein the endophytes comprise one or more of:
[0023] a flagellin gene having at least 97% identity to one or more of SEQ IDs. 1-8 or 14-16, an O-antigen biosynthesis gene having at least 97% identity to one or more of SEQ IDs. 240-243,
[0024] a pseudoaminic acid biosynthesis gene having at least 97% identity to one or more of SEQ IDs. 256-262,
[0025] a gene of a tailocin gene cluster having at least 97% identity to one or more of SEQ IDs. 288-342,
[0026] a gene of a Type IV secretion system having at least 97% identity to one or more of SEQ IDs. 938-941, and
[0027] a gene of a Type IV secretion system putative effector having at least 97% identity to one or more of SEQ IDs. 1018-1022,
[0028] wherein the endophyte in the synthetic combination is capable of improving a trait of agronomic importance in a plant or plant element heterologously disposed to the synthetic composition.

[0029] In some embodiments, a synthetic composition comprises one or more endophytes heterologously disposed to a treatment formulation, wherein the endophytes comprise one or more of:
[0030] a flagellin gene having at least 97% identity to one or more of SEQ IDs. 9, 55, 56, 130-133,
[0031] a pseudoaminic acid biosynthesis gene having at least 97% identity to one or more of SEQ IDs. 254-255,
[0032] a gene of a tailocin gene cluster having at least 97% identity to one or more of SEQ IDs. 288-289 or 566-605,
[0033] a gene of a Type IV secretion system having at least 97% identity to one or more of SEQ IDs. 974-977, and
[0034] a gene of a Type IV secretion system putative effector having at least 97% identity to one or more of SEQ IDs. 1054-1057,
[0035] wherein the endophyte in the synthetic combination is capable of improving a trait of agronomic importance in a plant or plant element heterologously disposed to the synthetic composition.

[0036] In some embodiments, a synthetic composition comprises one or more endophytes heterologously disposed to a treatment formulation, wherein the endophytes comprise one or more of:
[0037] a flagellin gene having at least 97% identity to one or more of SEQ IDs. 9, 11-13, 17-18, 20-23,
[0038] a pseudoaminic acid biosynthesis gene having at least 97% identity to one or more of SEQ IDs. 254-255,
[0039] a gene of a tailocin gene cluster having at least 97% identity to one or more of SEQ IDs. 287, 343, 382-390,
[0040] a gene of a Type IV secretion system having at least 97% identity to one or more of SEQ IDs. 934-937, and
[0041] a gene of a Type IV secretion system putative effector having at least 97% identity to one or more of SEQ IDs. 1015-1017 or 1024,
[0042] wherein the endophyte in the synthetic combination is capable of improving a trait of agronomic importance in a plant or plant element heterologously disposed to the synthetic composition.

[0043] In some embodiments, a synthetic composition comprises one or more endophytes heterologously disposed to a treatment formulation, wherein the endophytes comprise one or more of:
[0044] a flagellin gene having at least 97% identity to one or more of SEQ IDs. 10 or 19, a gene of a tailocin gene cluster having at least 97% identity to one or more of SEQ IDs. 375-381, and
[0045] a gene of a Type IV secretion system having at least 97% identity to SEQ ID. 944, wherein the endophyte in the synthetic combination is capable of improving a trait of agronomic importance in a plant or plant element heterologously disposed to the synthetic composition.

[0046] In some embodiments, a synthetic composition comprises one or more endophytes heterologously disposed to a treatment formulation, wherein the endophytes comprise one or more polynucleotide sequences at least 97% identical to one or more of SEQ ID NOs. 1-8, and the one or more endophytes are capable of producing one or more proteins whose amino acid sequences are selected from SEQ ID NOs. 1090-1096, wherein the endophyte in the synthetic combination is capable of improving biotic stress tolerance in an environment containing pathogenic Fusarium in a plant or plant element heterologously disposed to the synthetic composition.

[0047] In some embodiments, a synthetic composition comprises one or more endophytes heterologously disposed to a treatment formulation, wherein the endophytes comprise one or more polynucleotide sequences at least 97% identical to one or more of SEQ ID NOs. 9-13, 254, 255, 287, 934-937, 1015-1017, 1-8, 24-28, 75-85, 365-374, 442-452, 959-962, 1023, 1038-1041, and the one or more endophytes are capable of producing one or more proteins whose amino acid sequences are selected from SEQ ID NOs. 1097-1103, 1286, 1287, 1318, 1319, 1923-1926, 1982-1984, 1090-1096, 1113, 1114, 1149-1157, 1402-1409, 1471-1483, 1946-1947, 1990, 2005, 2006, wherein the endophyte in the synthetic combination is capable of improving biotic stress tolerance in an environment containing pathogenic Rhizocotina in a plant or plant element heterologously disposed to the synthetic composition.

[0048] In some embodiments, a synthetic composition comprises one or more endophytes heterologously disposed to a treatment formulation, wherein the endophytes comprise one or more polynucleotide sequences at least 97% identical to one or more of SEQ ID NOs. 1-18, 240-243, 254-262, 287-364, 934-943, 1015-1022, 19-74, 365-374, 391-441, 945-958, 1023, 1025-1037, and the one or more endophytes are capable of producing one or more proteins whose amino acid sequences are selected from SEQ ID NOs. 1090-1106, 1112, 1273-1276, 1286-1294, 1318-1401, 1923-1934, 1982-1989, 1107-1111, 1113-1148, 1402-1409, 1426-1470, 1936-1945, 1990, 1992-2004, wherein the endophyte in the synthetic combination is capable of improving biotic stress tolerance in an environment containing pathogenic Pythium in a plant or plant element heterologously disposed to the synthetic composition.

[0049] In some embodiments, a treatment formulation comprises liquid state fermentation broth. In some embodiments, a treatment formulation comprises one or more solid carrier. In some embodiments, a treatment formulation comprises one or more adherent. In some embodiments, a treatment formulation comprises talc and mineral oil. In some embodiments, a treatment formulation comprises kaolin clay, a dispersant, and a surfactant. In some embodiments, a treatment formulation comprises a sugar.

[0050] In some embodiments, the synthetic composition additionally comprises one or more of a surfactant, a buffer, a tackifier, a microbial stabilizer, a fungicide, an anticomplex agent, an herbicide, a nematicide, an insecticide, a plant growth regulator, a rodenticide, a desiccant, a nutrient, an excipient, a wetting agent, a salt, and a polymer. In some embodiments, the polymer is a biodegradable polymer selected from the group consisting of alginate, agarose, agar, gelatin, polyacrylamide, chitosan, polyvinyl alcohol, and combinations thereof. In some embodiments, the biodegradable polymer is alginate and the alginate is sodium alginate or calcium alginate.

[0051] In some embodiments, the synthetic composition comprises one or more endophytes of the present invention and one or more chemical or biological agents capable of killing a pest of a plant, impeding the feeding and or growth and or reproduction of a pest of a plant, repelling a pest of a plant, and or reducing the severity or extent of infection of a plant host by a pest of a plant, including without limitation chemical or biological agents that are acetylcholinesterase (AChE) inhibitors, GABA-gated chloride channel blockers, sodium channel modulators, nicotinic acetylcholine receptor (nAChR) competitive modulators, nicotinic acetylcholine receptor (nAChR) allosteric modulators-Site I, Glutamate-gated chloride channel (GluCl) allosteric modulators, Chordotonal organ TRPV channel modulators, Nicotinic acetylcholine receptor (nAChR) channel blockers, Octopamine receptor agonists, Voltage-dependent sodium channel blockers, multi-site inhibitors, Ryanodine receptor modulators, chordotonal organ modulators (wherein the chordotonal organ modulator does not bind to the Nan-lav TRPV channel complex), GABA-gated chloride channel allosteric modulators, GABA-gated chloride channel allosteric modulators-Site II, nicotinic acetylcholine receptor (nAChR) Allosteric Modulators-Site II, Juvenile hormone mimics, Mite growth inhibitors affecting CHS1, Inhibitors of chitin biosynthesis affecting CHS1, Inhibitors of chitin biosynthesis-type 1, Moulting disruptors-Dipteran, Ecdysone receptor agonists, Inhibitors of acetyl COA carboxylase, Inhibitors of mitochondrial ATP synthase, Uncouplers of oxidative phosphorylation via disruption of the proton gradient, Mitochondrial complex III electron transport inhibitors, Mitochondrial complex I electron transport inhibitors, Mitochondrial complex IV electron transport inhibitors, Mitochondrial complex II electron transport inhibitors, Microbial disruptors of insect midgut membranes, Host-specific occluded pathogenic viruses, other active compounds (such as Azadirachtin, Benzoximate, Bromopropylate, Chinomethionat, Dicofol, Lime sulfur, Mancozeb, Pyridalyl, Sulfur, Chlorantraniliprole, Clothianidin, Tioxazafen, Fluopyram, Triticonazole), other active bacterial agents (such as certain Burkholderia strains including without limitation Burkholderia rinojenses, Wolbachia pipientis), other active fungal agents (such as Beauveria bassiana strains, Metarhizium anisopliae strain F52, Paecilomyces fumosoroseus Apopka strain 97), biological essence including synthetics or extracts or refined or unrefined oils (such as Dysphania ambrosioides near ambrosioides extract, fatty acid monoesters with glycerol or propanediol, neem oil), non-specific mechanical disruptors (such as Diatomaceous earth), or combinations thereof. Examples of AChE inhibitors include without limitation Carbamates (such as Alanycarb, Aldicarb, Bendiocarb, Benfuracarb, Butocarboxim, Butoxycarboxim, Carbaryl, Carbofuran, Carbosulfan, Ethiofencarb, Fenobucarb, Formetanate, Furathiocarb, Isoprocarb, Methiocarb, Methomyl, Metolcarb, Oxamyl, Pirimicarb, Propoxur, Thiodicarb, Thiofanox, Triazamate, Trimethacarb, XMC, Xylylcarb) and Organophosphates (such as Acephate, Azamethiphos, Azinphos-ethyl, Azinphosmethyl, Cadusafos, Chlorethoxyfos, Chlorfenvinphos, Chlormephos, Chlorpyrifos, Chlorpyrifos-methyl, Coumaphos, Cyanophos, Demeton-S-methyl, Diazinon, Dichlorvos/DDVP, Dicrotophos, Dimethoate, Dimethylvinphos, Disulfoton, EPN, Ethion, Ethoprophos, Famphur, Fenamiphos, Fenitrothion, Fenthion, Fosthiazate, Heptenophos, Imicyafos, Isofenphos, Isopropyl O-(methoxyaminothio-phosphoryl) salicylate, Isoxathion, Malathion, Mecarbam, Methamidophos, Methidathion, Mevinphos, Monocrotophos, Naled, Omethoate, Oxydemeton-methyl, Parathion, Parathion-methyl, Phenthoate, Phorate, Phosalone, Phosmet, Phosphamidon, Phoxim, Pirimiphos-methyl, Profenofos, Propetamphos, Prothiofos, Pyraclofos, Pyridaphenthion, Quinalphos, Sulfotep, Tebupirimfos, Temephos, Terbufos, Tetrachlorvinphos, Thiometon, Triazophos, Trichlorfon, Vamidothion). Examples of GABA-gated chloride channel blockers include without limitation Cyclodiene Organochlorines (such as Chlordane, Endosulfan) and Phenylpyrazoles (Fiproles) (such as Ethiprole, Fipronil). Examples of sodium channel modulators include without limitation pyrethroids and pyrethrins (such as Acrinathrin, Allethrin, d-cis-trans Allethrin, d-trans Allethrin, Bifenthrin, Bioallethrin, Bioallethrin Scyclopentenyl isomer, Bioresmethrin, Cycloprothrin, Cyfluthrin, beta-Cyfluthrin, Cyhalothrin, lambda-Cyhalothrin, gamma-Cyhalothrin, Cypermethrin, alpha-Cypermethrin, beta-Cypermethrin, thetacypermethrin, zeta-Cypermethrin, Cyphenothrin, (1R)-trans-isomers], Deltamethrin, Empenthrin (EZ)-(1R)-isomers], Esfenvalerate, Etofenprox, Fenpropathrin, Fenvalerate, Flucythrinate, Flumethrin, tau-Fluvalinate, Halfenprox, Imiprothrin, Kadethrin, Permethrin, Phenothrin [(1R)-trans-isomer], Prallethrin, Pyrethrins (pyrethrum), Resmethrin, Silafluofen, Tefluthrin, Tetramethrin, Tetramethrin [(1R)-isomers], Tralomethrin, Transfluthrin) and Methoxychlor. Examples of nAChR competitive modulators include without limitation Neonicotinoids (such as Acetamiprid, Clothianidin, Dinotefuran, Imidacloprid, Nitenpyram, Thiacloprid, Thiamethoxam), nicotine, sulfoximines (such as Sulfoxaflor), Butenolides (such as Flupyradifurone), and Mesoionics (such as Triflumezopyrim). Examples of nAChR allosteric modulators-Site I include without limitation Spinosyns (such as Spinetoram, Spinosad). Examples of GluCl allosteric modulators include without limitation Avermectins and Milbemycins (such as Abamectin, Emamectin benzoate, Lepimectin, Milbemectin). Examples of multi-site inhibitors include without limitation Alkyl halides (such as Methyl bromide and other alkyl halides), Chloropicrin, Fluorides (such as Cryolite (Sodium aluminum fluoride), Sulfuryl fluoride), Borates (such as Borax, Boric acid, Disodium octaborate, Sodium borate, Sodium metaborate), Tartar emetic, Methyl isothiocyanate generators (such as Dazomet, Metam). Examples of chordotonal organ TRPV channel modulators include without limitation Pyridine azomethine derivatives (such as Pymetrozine, Pyrifluquinazon), and Pyropenes (such as Afidopyropen). Examples of juvenile hormone mimics include without limitation juvenile hormone analogues (such as Hydroprene, Kinoprene, Methoprene), fenoxycarb, and pyriproxyfen. Examples of mite growth inhibitors affecting CHS1 include without limitation Clofentezine, Diflovidazin, Hexythiazox, and Etoxazole. Examples of microbial disruptors of insect midgut membranes include without limitation Bacillus thuringiensis (such as Bacillus thuringiensis subsp. israelensis, Bacillus thuringiensis subsp. aizawai, Bacillus thuringiensis subsp. kurstaki, Bacillus thuringiensis subsp. tenebrionis, Bacillus thuringiensis strain EX297512) and the insecticidal proteins they produce (such as Cry1Ab, Cry1Ac, Cry1Fa, Cry1A.105, Cry2Ab, Vip3A, mCry3A, Cry3Ab, Cry3Bb, Cry34Ab1/Cry35Ab1) and Bacillus sphaericus. Examples of inhibitors of mitochondrial ATP synthase include without limitation Diafenthiuron, Organotin miticides (such as Azocyclotin, Cyhexatin, Fenbutatin oxide), Propargite, and Tetradifon. Examples of uncouplers of oxidative phosphorylation via disruption of the proton gradient include without limitation Pyrroles (such as Chlorfenapyr), Dinitrophenols, and Sulfluramid. Examples of nAChR channel blockers include without limitation Nereistoxin analogues (such as Bensultap, Cartap hydrochloride, Thiocyclam, Thiosultap-sodium). Examples of inhibitors of chitin biosynthesis affecting CHS1 include without limitation Benzoylureas (such as Bistrifluron, Chlorfluazuron, Diflubenzuron, Flucycloxuron, Flufenoxuron, Hexaflumuron, Lufenuron, Novaluron, Noviflumuron, Teflubenzuron, Triflumuron). Examples of inhibitors of chitin biosynthesis-type 1 include without limitation Buprofezin. Examples of moulting disruptors (Dipteran) include without limitation Cyromazine. Examples of ecdysone receptor agonists include without limitation Diacylhydrazines (such as Chromafenozide, Halofenozide, Methoxyfenozide, Tebufenozide). Examples of octopamine receptor agonists include without limitation Amitraz. Examples of mitochondrial complex III electron transport inhibitors include without limitation Hydramethylnon, Acequinocyl, Fluacrypyrim, and Bifenazate. Examples of mitochondrial complex I electron transport inhibitors include without limitation METI acaricides and insecticides such as Fenazaquin, Fenpyroximate, Pyridaben, Pyrimidifen, Tebufenpyrad, Tolfenpyrad) and Rotenone. Examples of voltage-dependent sodium channel blockers include without limitation Oxadiazines (such as Indoxacarb) and Semicarbazones (such as Metaflumizone). Examples of inhibitors of acetyl CoA carboxylase include without limitation Tetronic and Tetramic acid derivatives (such as Spirodiclofen, Spiromesifen, Spiropidion, Spirotetramat). Examples of mitochondrial complex IV electron transport inhibitors include without limitation Phosphides (Aluminium phosphide, Calcium phosphide, Phosphine, Zinc phosphide), Cyanides (such as Calcium cyanide, Potassium cyanide, Sodium cyanide). Examples of mitochondrial complex II electron transport inhibitors include without limitation Beta-ketonitrile derivatives (such as Cyenopyrafen, Cyflumetofen) and Carboxanilides (such as Pyflubumide). Examples of ryanodine receptor modulators include without limitation such as Diamides (such as Chlorantraniliprole, Cyantraniliprole, Cyclaniliprole Flubendiamide, Tetraniliprole). Examples of chordotonal organ modulators include without limitation Flonicamid. Examples of GABA-gated chloride channel allosteric modulators include without limitation Meta-diamides (Broflanilide) and Isoxazolines (such as Fluxametamide). Examples of nicotinic acetylcholine receptor (nAChR) Allosteric Modulators-Site II include without limitation GS-omega/kappa HXTX-Hv1a peptide.

[0052] In some embodiments, the synthetic composition comprises one or more endophytes of the present invention and one or chemical or biological agent capable of killing a pathogen of a plant, impeding the feeding and or growth and or reproduction of a pathogen of a plant, repelling a pathogen of a plant, and or reducing the severity or extent of infection of a plant host by a pathogen of a plant, including without limitation chemical or biological agents that are PhenylAmides fungicides (acylalanines, oxazolidinones, butyrolactones), hydroxy-(2-amino-) pyrimidines, heteroaromatics (such as isoxazoles, isothiazolones), carboxylic acids, Methyl-Benzimidazole-Carbamates (MBC) fungicides (such as thiophanates, benzimidazoles), N-phenyl carbamates, benzamides (such as toluamides, pyridinylmethyl-benzamides), thiazole carboxamide (such as ethylamino-thiazole-carboxamide), phenylureas, cyanoacrylates (such as aminocyanoacrylates), aryl-phenyl-ketones (such as benzophenone, benzoylpyridine), pyrimidinamines, pyrazole-MET1 (such as pyrazole-5-carboxamides), quinazoline, succinate-dehydrogenase inhibitors (SDHI) (such as phenyl-benzamides, phenyl-oxo-ethyl thiophene amide, pyridinyl-ethyl-benzamides, phenyl-cyclobutyl-pyridineamide, furan-carboxamides, oxathiin-carboxamides, thiazole-carboxamides, pyrazole-4-carboxamides, N-cyclopropyl-N-benzyl-pyrazole-carboxamides, N-methoxy-(phenyl-ethyl)-pyrazole-carboxamides, pyridine-carboxamides, pyrazine-carboxamides, pydiflumetofen, fluxapyroxad), quinone outside inhibitors (such as methoxy-acrylates, methoxy-acetamide, methoxy-carbamates, oximino-acetates, oximino-acetamides, oxazolidine-diones, dihydro-dioxazines, imidazolinones, benzyl-carbamates, tetrazolinones), quinone inside inhibitors (such as cyano-imidazole, sulfamoyl-triazole, picolinamides), uncouplers of oxidative phosphorylation (such as dinitrophenyl-crotonates, 2,6-dinitro-anilines), organo tin compounds (tri-phenyl tin compounds), thiophene-carboxamides, Quinone outside Inhibitor-stigmatellin binding type (such as triazolo-pyrimidylamine), anilino-pyrimidines, enopyranuronic acid antibiotic, hexopyranosyl antibiotic, glucopyranosyl antibiotic, tetracycline antibiotic, aza-naphthalenes (such as aryloxyquinoline, quinazolinone), phenylpyrroles, dicarboximides, phosphoro-thiolates, dithiolanes, aromatic hydrocarbons, chlorophenyls, nitroanilines, heteroaromatics (such as 1,2,4-thiadiazoles), carbamates, demethylation inhibitors (such as piperazines, pyridines, pyrimidines, imidazoles, triazoles, triazolinthiones), amines (such as morpholines, piperidines, spiroketal-amines), ketoreductase inhibitors (such as hydroxyanilides, amino-pyrazolinone), thiocarbamates, allylamines, polyoxins (such as peptidyl pyrimidine nucleoside), Carboxylic Acid Amides (such as cinnamic acid amides, valinamide carbamates, mandelic acid amides), melanin biosynthesis inhibitors-reductase (such as isobenzo-furanone, pyrrolo-quinolinone, triazolobenzo-thiazole), melanin biosynthesis inhibitors-dehydratase (such as cyclopropane-carboxamide, carboxamide, propionamide), melanin biosynthesis inhibitors-polyketide synthase (such as trifluoroethyl-carbamate), benzo-thiadiazole, benzisothiazole, thiadiazole-carboxamide, polysaccharides (such as laminarin), plant ethanol extracts (such as anthraquinones, resveratrol, extract from Reynoutria sachalinensis), phosphonates (such as ethyl phosphonates, fosetyl-Al, phosphorous acid and salts), isothiazole (such as isothiazolylmethyl ether), cyanoacetamide-oxime, phthalamic acids, benzotriazines, benzene-sulphonamides, pyridazinones, phenyl-acetamide, guanidines, thiazolidine (such as cyano-methylene-thiazolidines), pyrimidinone-hydrazones, 4-quinolyl-acetates, tetrazolyloximes, glucopyranosyl antibiotics, copper salts, sulphur, dithio-carbamates and relatives (such as amobam, ferbam, mancozeb, maneb, metiram, propineb, thiram, zinc thiazole, zineb, ziram), phthalimides, chloronitriles (phthalonitriles), sulfamides (such as dichlofluanid, tolylfluanid), bis-guanidines (such as guazatine, iminoctadine), triazines (such as anilazine), quinones (anthraquinones) (such as dithianon), quinoxalines (such as chinomethionat, quinomethionate), maleimide (such as fluoroimide), thiocarbamate (such as methasulfocarb), polypeptide (lectin) plant extracts (such as extract from the cotyledons of lupine plantlets), phenol and sesquiterpene and triterpenoid and coumarin plant extracts (such as extract from Swinglea glutinosa), terpene hydrocarbon and terpene alcohol and terpene phenol extracts plant extracts (such as extract from Melaleuca alternifolia, plant oils such as eugenol, geraniol, thymol mixtures thereof), Polyene (such as amphoteric macrolide antifungal antibiotic from Streptomyces natalensis or Streptomyces chattanoogensis), oxysterol binding protein homologue inhibition (piperidinyl-thiazole-isoxazolines), other active compounds (such as Fludioxonil, Mefenoxam, Sedaxane, Azoxystrobin, Thiabendazole, Ethaboxam, metalaxyl (such as without limitation metalaxyl-M), Trifloxystrobin, Myclobutanil, Acibenzolar-S-methyl, Metconazole, tolclofos-methyl, Fluopyram, Ipconazole, Oxathiapiprolin, Difenoconazole, Prothyoconazol, Tebuconazole, Pyraclostrobin, Fluxapyroxad, Triticonazole, Fluaxapyroxad), and combinations thereof.

[0053] In some embodiments, the synthetic composition comprises one or more endophytes of the present invention and one or more biological agents (for example bacterial or fungal agents) including, but not limited to, those agents capable of killing a pest or pathogen of a plant, impeding the feeding and or growth and or reproduction of a pest or pathogen of a plant, repelling a pest or pathogen of a plant, and or reducing the severity or extent of infection of a plant host by a pathogen or pest of a plant. The one or more bacterial or fungal agents may be living or dead (including without limitation by heat inactivation) bacteria or fungi, extracts and or metabolites of bacteria or fungi (including without limitation extracts and or metabolites in spent growth media), or combinations thereof. Non-limiting examples of biological agents include Trichoderma species including without limitation Trichoderma atroviride strain I-1237, Trichoderma atroviride strain LU132, Trichoderma atroviride strain SC1, Trichoderma atroviride strain SKT-1, Trichoderma atroviride strain 77B, Trichoderma asperellum strain T34, Trichoderma asperellum strain kd, Trichoderma harzianum strain T-22, Trichoderma virens strain G-41; Clonostachys species including without limitation Gliocladium catenulatum strain J1446, Clonostachys rosea strain CR-7; Coniothyrium species including without limitation Coniothyrium minitans strain CON/M/91-08; Talaromyces species including without limitation Talaromyces flavus strain SAY-Y-94-01; Saccharomyces species including without limitation Saccharomyces cerevisae strain LAS02; Bacillus species including without limitation Bacillus amyloliquefaciens strain QST713, Bacillus amyloliquefaciens strain FZB24, Bacillus amyloliquefaciens strain MBI600, Bacillus amyloliquefaciens strain D747, Bacillus amyloliquefaciens strain F727, Bacillus amyloliquefaciens strain AT-332, Bacillus amyloliquefaciens strain MBI 600 Bacillus mycoides isolate J, Bacillus subtilis strain AFS032321, Bacillus subtilis strain Y1336, Bacillus subtilis strain MBI 600, Bacillus subtilis strain HAI-0404, Bacillus firmus I-1582); Pseudomonas species including without limitation Pseudomonas chlororaphis strain AFS009; Streptomyces species including without limitation Streptomyces griseovirides strain K61, Streptomyces lydicus strain WYEC108; Penicillium species such as Penicillium bilaiae, Penicillium bilaiae; and Pasteuria species including without limitation Pasteuria nishizawae Pn1).

[0054] In some embodiments, one or more endophytes of the present invention and one or chemical or biological agents described herein are present in a synthetic composition at a weight ratio of between 1000:1 and 1:1000, 100:1 and 1:100, or 10:1 and 1:10.

[0055] In some embodiments, the synthetic composition may be stored at between 0 degrees Celsius and 4 degrees Celsius for 1 week with less than 1 log loss of CFU of the one or more endophytes. In some embodiments, the synthetic composition may be stored at between 4.1 degrees Celsius and 20 degrees Celsius for 1 week with less than 1 log loss of CFU of the one or more endophytes. In some embodiments, the synthetic composition may be stored at between 20.1 degrees Celsius and 35 degrees Celsius for 1 week with less than 1 log loss of CFU of the one or more endophytes.

[0056] In some embodiments, a synthetic composition comprises one or more endophytes heterologously disposed into a treatment formulation. In some embodiments, the treatment formulation is a liquid. In some embodiments, an endophyte heterologously disposed into a liquid treatment formulation is present in the treatment formulation at a titer of at least 1E7, 1E8, 1E9, 1E10 CFU/mL. In some embodiments, an endophyte heterologously disposed into a liquid treatment formulation is present in the treatment formulation at a titer of between 1E7 and 1E9 CFU/mL. In some embodiments, an endophyte heterologously disposed into a liquid treatment formulation is present in the treatment formulation at a titer of between 1E7 and 1E9 CFU/mL. In some embodiments, an endophyte heterologously disposed into a liquid treatment formulation is present in the treatment formulation at a titer of about 3E9 CFU/mL. In some embodiments, the treatment formulation is a powder, for example a wettable powder or a flowable powder. In some embodiments, an endophyte heterologously disposed into powder treatment formulation is present in the treatment formulation at a titer of at least 1E7, 1E8, 1E9, 1E10, 1E11, 1E12 CFU/g. In some embodiments, an endophyte heterologously disposed into a powder treatment formulation is present in the treatment formulation at a titer of between 1E7 and 1E11 CFU/mL. In some embodiments, an endophyte heterologously disposed into a powder treatment formulation is present in the treatment formulation at a titer of between 1E8 and 1E10 CFU/mL. In some embodiments, an endophyte heterologously disposed into a powder treatment formulation is present in the treatment formulation at a titer of about 3E9 CFU/mL. In some embodiments, an endophyte heterologously disposed into a powder treatment formulation is present in the treatment formulation at a titer of about 2E10 CFU/mL. In some embodiments, an endophyte heterologously disposed into a wettable powder treatment formulation is present in the treatment formulation at a titer of between 1E9 and 1E11 CFU/mL. In some embodiments, an endophyte heterologously disposed into a flowable powder treatment formulation is present in the treatment formulation at a titer of between 1E9 and 1E10 CFU/mL.

[0057] In yet another aspect, described herein are methods of enriching a population of beneficial endophytes, comprising determining the presence or abundance of one or more endophytes in a plant element, growth medium or growth environment, wherein the one or more endophytes comprise at least one polynucleotide sequence that is at least 97% identical to one or more of SEQ ID NOs. 1-83, and combinations thereof. In some embodiments, the presence or abundance of one or more endophytes is determined relative to a reference plant element, growth medium or growth environment. In some embodiments, the one or more endophytes are not present in the reference plant element, growth medium or growth environment. In some embodiments, the one or more endophytes are less abundant in the reference plant element, growth medium or growth environment. In some embodiments, the presence or abundance of one or more endophytes is determined in a plant element and modulation of one or more traits of agronomic importance is inferred from the presence or amount of the one or more endophytes in the plant element. In some embodiments, the presence or abundance of one or more endophytes is determined in a growth medium and the capacity of the growth medium to modulate one or more trait of agronomic importance in a plant element planted therein is inferred from the presence or amount of the one or more endophytes in the growth medium. In some embodiments, the presence or abundance of one or more endophytes is determined in a growth environment and the capacity of the growth environment to modulate one or more trait of agronomic importance in a plant element grown therein is inferred from the presence or amount of the one or more endophytes in the growth environment. In some embodiments, the presence or abundance of one or more endophytes is determined by polymerase chain reaction, fluorescence in situ hybridization, or isothermal amplification. In some embodiments, the method further comprises the step of isolating the selected endophytes.

[0058] In some embodiments, a plurality of nucleic acid probes are used to determine the presence or abundance of one or more endophytes in a plant element, growth medium or growth environment, wherein the plurality comprises complementary or reverse complementary sequences to a region of at least 10 contiguous nucleotides within one or more polynucleotide sequences selected from the group consisting of SEQ ID NOs. 1-83, and combinations thereof. In some embodiments, the complementary or reverse complementary region comprises at least 20 contiguous nucleotides. In some embodiments, the complementary or reverse complementary region comprises at least 30 contiguous nucleotides. In some embodiments, the complementary or reverse complementary region comprises at least 40 contiguous nucleotides. In some embodiments, the plurality of nucleic acid probes are single-stranded DNA. In some embodiments, the plurality of nucleic acid probes are attached to one or more solid supports. In some embodiments, the plurality of nucleic acid probes are attached to a plurality of beads. In some embodiments, the plurality of nucleic acid probes are attached to a contiguous solid support.

[0059] In some embodiments, the plant element is a monocot. In some embodiments, the monocot is a cereal. In some embodiments, the cereal is selected from the group consisting of wheat, rice, barley, buckwheat, rye, millet, oats, corn, sorghum, triticale and spelt. In some embodiments, the cereal is wheat.

[0060] In some embodiments, the plant element is a dicot. In some embodiments, the dicot is selected from the group consisting of cotton, tomato, lettuce, peppers, cucumber, endive, melon, potato, cannabis, and squash. In some embodiments, the dicot is a legume. In some embodiments, the legume is soy, peas or beans.

[0061] In some embodiments, the plant element is a whole plant, seedling, meristematic tissue, ground tissue, vascular tissue, dermal tissue, seed, leaf, root, shoot, stem, flower, fruit, stolon, bulb, tuber, corm, keikis, shoot, or bud. In some embodiments, the plant element is a seed.

[0062] In some embodiments, the trait of agronomic importance is selected from the group consisting of drought tolerance, heat tolerance, cold tolerance, salinity tolerance, metal tolerance, herbicide tolerance, improved water use efficiency, improved nitrogen utilization, improved nitrogen fixation, improved nutrient use efficiency, improved nutrient utilization, biotic stress tolerance, improved disease resistance, yield improvement, health enhancement, vigor improvement, decreased necrosis, decreased chlorosis, decreased area of necrotic tissue, decreased area of chlorotic tissue, growth improvement, photosynthetic capability improvement, nutrition enhancement, altered protein content, altered oil content, increased biomass, increased shoot height, increased root length, increased shoot biomass, increased root biomass, increased leaf area, increased shoot area, increased root area, improved root architecture, increased seed germination percentage, increased seed germination rate, increased seedling survival, increased survival, photosynthetic efficiency, transpiration rate, seed/fruit number or mass, plant grain or fruit yield, leaf chlorophyll content, photosynthetic rate, wilt recovery, turgor pressure, modulation of a metabolite, production of a volatile organic compound (VOC), modulation of the proteome, increased seed weight, altered seed carbohydrate composition, altered seed oil composition, altered seed protein composition, altered seed nutrient composition, and combinations thereof. In some embodiments, the trait of agronomic importance is biotic stress tolerance. In some embodiments, the trait of agronomic importance is improved nutrient use efficiency. In some embodiments, the trait of agronomic importance is drought tolerance.

[0063] In some embodiments, the one or more endophytes is a member of the Class Gammaproteobacteria. In some embodiments, the one or more endophytes is a member of the Order Enterobacterales. In some embodiments, the one or more endophytes is a member of the Family Enterobacteriaceae. In some embodiments, the one or more endophytes is a member of the Genus Kosakonia. In some embodiments, the one or more endophytes is a Kosakonia cowanii.

[0064] In some embodiments, the one or more endophytes comprises at least 2 endophytes. In some embodiments, the one or more endophytes comprises at least 3 endophytes. In some embodiments, the one or more endophytes comprises at least 4 endophytes. In some embodiments, the one or more endophytes comprises at least 5 endophytes. In some embodiments, the one or more endophytes comprises at least 10 endophytes.

[0065] In some embodiments, the one or more endophytes are encapsulated in polymeric beads. In some embodiments, the polymeric beads are less than 500 μm in diameter at their widest point. In some embodiments, the polymeric beads are less than 200 μm in diameter at their widest point. In some embodiments, the polymeric beads are less than 100 μm in diameter at their widest point. In some embodiments, the polymeric beads are less than 50 μm in diameter at their widest point. In some embodiments, the polymeric beads' average diameter at their widest point is between 500 μm and 250 μm. In some embodiments, the polymeric beads' average diameter at their widest point is between 249 μm and 100 μm. In some embodiments, the polymeric beads' average diameter at their widest point is between 100 μm and 50 μm.

[0066] In some embodiments, the one or more endophytes are encapsulated in inorganic or mineral particles. In some embodiments, the inorganic or mineral particles are silica, clay, talc, sand, silt, and magnetite. In some embodiments, the one or more endophytes are encapsulated in organic matter particles. In some embodiments, the organic matter particles are urea, humus, active carbons, proteins, biochar, carbohydrate, and lipids.

### BRIEF DESCRIPTION OF THE DRAWINGS

[0067] FIG. 1A, FIG. 1B, FIG. 2, FIG. 3A, FIG. 3B, and FIG. 4 show exemplary images of sterile plates; each was inoculated with a plug of fungal pathogen placed in the center of the plate, and surrounded by four autoclaved wheat seeds treated with MIC-70076 or chemical fungicide or untreated controls. FIG. 1A, FIG. 1B, FIG. 2, FIG. 3A, FIG. 3B, and FIG. 4 contain the following numeric annotations: 101 indicates autoclaved wheat seeds that are not surrounded by pathogen hyphae, 102 indicates autoclaved wheat seeds that are in contact with pathogen hyphae, 103 indicates the outer edge of the pathogen colony, 104 indicates the position of inoculation with a plug of pathogen, 105 indicates a region of visible biofilm formation.

[0068] FIG. 1A, FIG. 1B, and FIG. 2 show exemplary images of plates inoculated with Dreschlera tritici-repentis.

[0069] FIG. 1A shows an exemplary image of a plate inoculated with Dreschlera tritici-repentis and four autoclaved wheat seeds treated with MIC-70076 (0.65 ml/kg).

[0070] FIG. 1A shows that a visible biofilm has formed around the treated seed 105, a halo of inhibition has formed around each seed, and the area of Dreschlera tritici-repentis growth on the plate is limited. FIG. 1B shows an exemplary image of a plate inoculated with Dreschlera tritici-repentis and four autoclaved wheat seeds treated with chemical fungicides Thiram and Carbendazim. FIG. 1B also shows the area of Dreschlera tritici-repentis growth on the plate is limited.

[0071] FIG. 2 shows an exemplary image of a plate inoculated with Dreschlera tritici-repentis and four wheat seeds not treated with any endophyte or chemical fungicide. All autoclaved wheat seeds shown in FIG. 2 are in contact with pathogen hyphae.

[0072] FIG. 3A shows an exemplary image of a plate inoculated with Bipolaris sorokiniana and autoclaved four wheat seeds treated with MIC-70076 (0.65 ml/kg). FIG. 3A shows that a region of inhibition has formed around each seed, and the area of Bipolaris sorokiniana growth on the plate is limited.

[0073] FIG. 3B shows an exemplary image of a plate inoculated with Bipolaris sorokiniana and four wheat seeds treated with chemical fungicides Thiram and Carbendazim. FIG. 3B also shows the area of Bipolaris sorokiniana is not significantly reduced relative to the untreated control in FIG. 4. The Thiram and Carbendazim treatment did not reduce the area of Bipolaris sorokiniana growth on the plate. All autoclaved wheat seeds shown in FIG. 3B are in contact with pathogen hyphae.

[0074] FIG. 4 shows an exemplary image of a plate inoculated with Bipolaris sorokiniana and four autoclaved wheat seeds not treated with any endophyte or chemical fungicide. All autoclaved wheat seeds shown in FIG. 4 are in contact with pathogen hyphae.

[0075] FIG. 5 shows the average colony diameter (in mm) of plates inoculated with Bipolaris sorokiniana by days of incubation and seed treatment. Three seed treatments are shown, from left to right: results from plates containing seeds treated with 0.65 ml/kg MIC-70076, seeds treated with chemical fungicides Thiram and Carbendazim, and untreated seeds. For each of the three treatments, bars represent the diameter in millimeters of the Bipolaris sorokiniana colony, from left to right, after 2, 4, 6, and 8 days of incubation.

[0076] FIG. 6 shows the average colony diameter (in mm) of plates inoculated with Dreschlera tritici-repentis by days of incubation and seed treatment. Three seed treatments are shown, from left to right: results from plates containing seeds treated with 0.65 ml/kg MIC-70076, seeds treated with chemical fungicides Thiram and Carbendazim, and untreated seeds. For each of the three treatments, bars represent the diameter in millimeters of the Dreschlera tritici-repentis colony, from left to right, after 2, 4, 6, and 8 days of incubation.

### DETAILED DESCRIPTION

[0077] Terms used in the claims and specification are defined as set forth below unless otherwise specified.

[0078] It must be noted that, as used in the specification and the appended claims, the singular forms “a,” “an” and “the” include plural referents unless the context clearly dictates otherwise.

[0079] This invention relates to methods and compositions for improving plant health. The present invention includes methods for improving plant health, as well as synthetic compositions comprising endophytes capable of improving plant health, and nucleic acid probes and nucleic acid detection kits that may be used to identify endophytes of the present invention.

[0080] “Plant health” is demonstrated by the improvement of a trait of agronomic importance in a plant or plant element as compared to a reference plant or plant element. A trait of agronomic importance includes, but is not limited to, drought tolerance, heat tolerance, cold tolerance, salinity tolerance, metal tolerance, herbicide tolerance, improved water use efficiency, improved nitrogen utilization, improved nitrogen fixation, improved nutrient use efficiency, improved nutrient utilization, biotic stress tolerance, increased disease resistance, yield improvement, health enhancement, vigor improvement, decreased necrosis, decreased chlorosis, decreased area of necrotic tissue, decreased area of chlorotic tissue, decreased pathogen load of tissues, growth improvement, photosynthetic capability improvement, nutrition enhancement, altered protein content, altered oil content, increased biomass, increased shoot height, increased root length, increased shoot biomass, increased root biomass, increased leaf area, increased shoot area, increased root area, improved root architecture, increased seed germination percentage, increased seed germination rate, increased seedling survival, increased survival, photosynthetic efficiency, transpiration rate, seed/fruit number or mass, plant grain or fruit yield, leaf chlorophyll content, photosynthetic rate, wilt recovery, turgor pressure, modulation of a metabolite, production of a volatile organic compound (VOC), modulation of the proteome, increased seed weight, altered seed carbohydrate composition, altered seed oil composition, altered seed protein composition, altered seed nutrient composition, and combinations thereof. The phrase “biotic stress” refers to a growth environment comprising one or more pests or pathogens. Pests can be nematodes and/or insects. In some embodiments, a pest is of an order Lepidoptera, Hemiptera, Tylenchida/Rhabditida, Dorylaimida, Trichinellida, or Triplonchida. In some embodiments, a pest is of a genera Chrysodeixis, Trichoplusia, Nezara, Lygus, Aphis, Belonolaimus, Xiphenema, Trichodorus, Pratylenchus, Aphelenchoides, Meloidogyne, or Rotylenchulus. Pathogens can be fungal, viral, protist, or bacterial pathogens, for example pathogens of vertebrates or plants. In some embodiments, a pathogen is of a genera Pythium, Rhizoctonia, Phytophthora, Fusarium, Alternaria, Stagonospora, Aspergillus, Magnaporthe, Biopolaris, Dreschlera, Botrytis, Puccinia, Blumeria, Erysiphe, Leveillula, Mycosphaerella, or Colletotrichum.

[0081] “Biomass” means the total mass or weight (fresh or dry), at a given time (for example, age or stage of development), of a plant tissue, plant tissues, an entire plant, or population of plants. The term may also refer to all the plants or species in the community (“community biomass”).

[0082] An “increased yield” can refer to any increase in seed or fruit biomass; or seed, seed pod or ear, or fruit number per plant; or seed or fruit weight; or seed or fruit size per plant or unit of production area, e.g. acre or hectare. For example, increased yield of seed or fruit biomass may be measured in units of bushels per acre, pounds per acre, tons per acre, or kilos per hectare. An increased yield can also refer to an increased production of a component of, or product derived from, a plant or plant element or of a unit of measure thereof. For example, increased carbohydrate yield of a grain or increased oil yield of a seed. Typically, where yield indicates an increase in a particular component or product derived from a plant, the particular characteristic is designated when referring to increased yield, e.g., increased oil or grain yield or increased protein yield or seed size.

[0083] “Nutrition enhancement” refers to modulation of the presence, abundance or form of one or more substances in a plant element, wherein the modulation of the one or more substances provides a benefit to other organisms that consume or utilize said plant element.

[0084] Synthetic compositions and methods of use described herein may improve plant health by providing an improved benefit or tolerance to a plant that is of at least 0.1%, at least 0.5%, at least 1%, at least 2%, at least 3%, between 3% and 5%, at least 5%, between 5% and 10%, at least 10%, between 10% and 15%, for example at least 15%, between 15% and 20%, at least 20%, between 20% and 30%, at least 30%, between 30% and 40%, at least 40%, between 40% and 50%, at least 50%, between 50% and 60%, at least 60%, between 60% and 75%, at least 75%, between 75% and 100%, at least 100%, between 100% and 150%, at least 150%, between 150% and 200%, at least 200%, between 200% and 300%, at least 300% or more, when compared with a reference plant. A “reference plant”, “reference plant element”, “reference agricultural plant” or “reference seed” means a similarly situated plant or seed of the same species, strain, or cultivar to which a treatment, formulation, composition or endophyte preparation as described herein is not administered/contacted. A reference plant, therefore, is identical to the treated plant except for the presence of the active ingredient to be tested and can serve as a control for detecting the effects of the treatment conferred to the plant. A plurality of reference plants may be referred to as a “reference population”.

[0085] In some embodiments, one or more endophytes and or one or more compounds produced by one or more endophytes are heterologously disposed on a plant element in an effective amount to improve plant health. In some embodiments, an improvement of plant health is measured by an increase in a trait of agronomic importance, for example root length or yield. In some embodiments, an improvement of subject health is measured by a decrease in a trait of importance, for example necrosis or chlorosis. In some embodiments, improved plant health is demonstrated by an improvement of a trait of agronomic importance or tolerance in a treated plant by at least 0.1%, at least 0.5%, at least 1%, at least 2%, at least 3%, between 3% and 5%, at least 5%, between 5% and 10%, at least 10%, between 10% and 15%, for example at least 15%, between 15% and 20%, at least 20%, between 20% and 30%, at least 30%, between 30% and 40%, at least 40%, between 40% and 50%, at least 50%, between 50% and 60%, at least 60%, between 60% and 75%, at least 75%, between 75% and 100%, at least 100%, between 100% and 150%, at least 150%, between 150% and 200%, at least 200%, between 200% and 300%, at least 300% or more, as compared to a reference plant or plant element. In some embodiments, improved plant health is demonstrated by a “win rate” a proportion of experimental trials showing an improvement of a trait of agronomic importance or tolerance in a treated plant relative as compared to a reference plant or plant element. In some embodiments the win rate is at least 10%, at least 20%, at least 30%, at least 40%, at least 50%, at least 60%, at least 70%, at least 75%, at least 80% or more.

[0086] An “effective amount” of one or more endophytes is the amount capable of improving trait of agronomic importance or tolerance by at least 0.1%, at least 0.5%, at least 1%, at least 2%, at least 3%, between 3% and 5%, at least 5%, between 5% and 10%, at least 10%, between 10% and 15%, for example at least 15%, between 15% and 20%, at least 20%, between 20% and 30%, at least 30%, between 30% and 40%, at least 40%, between 40% and 50%, at least 50%, between 50% and 60%, at least 60%, between 60% and 75%, at least 75%, between 75% and 100%, at least 100%, between 100% and 150%, at least 150%, between 150% and 200%, at least 200%, between 200% and 300%, at least 300% or more, as compared to a reference plant element not further comprising said endophyte. In some embodiments, an effective amount of treatment comprising an endophyte is at least 10 CFU per unit of plant element, at least 10\hat{ }2 CFU per unit of plant element, between 10\hat{ }2 and 10\hat{ }3 CFU per unit of plant element, at least about 10\hat{ }3 CFU per unit of plant element, between 10\hat{ }3 and 10\hat{ }4 CFU per unit of plant element, at least about 10\hat{ }4 CFU per unit of plant element, between 10\hat{ }4 and 10\hat{ }5 CFU per unit of plant element, at least about 10\hat{ }5 CFU, between 10\hat{ }5 and 10\hat{ }6 CFU per unit of plant element, at least about 10\hat{ }6 CFU per unit of plant element, between 10\hat{ }6 and 10\hat{ }7 CFU per unit of plant element, at least about 10\hat{ }7 CFU per unit of plant element, between 10\hat{ }7 and 10\hat{ }8 CFU per unit of plant element, or even greater than 10\hat{ }8 CFU per unit of plant element. A unit of a plant element may be an individual plant element, e.g. an individual seed, or a unit of area surface area of a plant element, e.g. a square inch of leaf tissue, or unit of surface area of a plant element, e.g. a cubic centimeter of root.

[0087] The methods and compositions of the present invention are broadly applicable to cultivated plants, particularly plants that are cultivated by humans for food, feed, fiber, fuel, and/or industrial purposes. In some embodiments, plants (including seeds and other plant elements) are monocots or dicots. In some embodiments, plants used in the methods and compositions of the present invention include, but are not limited to: agricultural row, agricultural grass plants or other field crops: wheat, rice, barley, buckwheat, beans (for example: soybean, snap, dry), corn (for example: grain, seed, sweet corn, silage, popcorn, high oil), canola, peas (for example: dry, succulent), peanuts, safflower, sunflower, alfalfa hay, forage and cover crops (for example: alfalfa, clover, vetch, and trefoil), berries and small fruits (for example: blackberries, blueberries, currants, elderberries, gooseberries, huckleberries, loganberries, raspberries, strawberries, bananas and grapes), bulb crops (for example: garlic, leeks, onions, shallots, and ornamental bulbs), citrus fruits (for example: citrus hybrids, grapefruit, kumquat, lines, oranges, and pummelos), cucurbit vegetables (for example: cucumbers, melons, gourds, pumpkins, and squash), flowers (for example: ornamental, horticultural flowers including roses, daisies, tulips, freesias, carnations, heather, lilies, irises, orchids, snapdragons, and ornamental sunflowers), bedding plants, ornamentals, fruiting vegetables (for example: eggplant, sweet and hot peppers, tomatillos, and tomatoes), herbs, spices, mints, hydroponic crops (for example: cucumbers, tomatoes, lettuce, herbs, and spices), leafy vegetables and cole crops (for example: arugula, celery, chervil, endive, fennel, lettuce including head and leaf, parsley, radicchio, rhubarb, spinach, Swiss chard, broccoli, Brussels sprouts, cabbage, cauliflower, collards, kale, kohlrabi, and mustard greens), asparagus, legume vegetable and field crops (for example: snap and dry beans, lentils, succulent and dry peas, and peanuts), pome fruit (for example: pears and quince), root crops (for example: beets, sugar beets, red beets, carrots, celeriac, chicory, horseradish, parsnip, radish, rutabaga, salsify, and turnips), deciduous trees (for example: maple and oak), evergreen trees (for example: pine, cedar, hemlock and spruce), small grains (for example: rye, wheat including spring and winter wheat, millet, oats, barley including spring and winter barley, and spelt), stone fruits (for example: apricots, cherries, nectarines, peaches, plums, and prunes), tree nuts (for example: almonds, beech nuts, Brazil nuts, butternuts, cashews, chestnuts, filberts, hickory nuts, macadamia nuts, pecans, pistachios, and walnuts), and tuber crops (for example: potatoes, sweet potatoes, yams, artichoke, cassava, and ginger). In a particular embodiment, the agricultural plant is selected from the group consisting of rice (Oryza sativa and related varieties), soy (Glycine max and related varieties), wheat (Triticum aestivum and related varieties), oats (Avena sativa and related varieties), barley (Hordeum vulgare and related varieties), corn (Zea mays and related varieties), peanuts (Arachis hypogaea and related varieties), canola (Brassica napus, Brassica rapa and related varieties), coffee (Coffea spp.), cocoa (Theobroma cacao), melons, and tomatoes (Solanum lycopsersicum and related varieties).

[0088] Plant health may be improved by treatment of a plant or plant element. A “plant element” is intended to generically reference either a whole plant or a plant component, including but not limited to plant tissues, parts, and cell types. A plant element is preferably one of the following: whole plant, seedling, meristematic tissue, ground tissue, vascular tissue, dermal tissue, seed, leaf, root, shoot, stem, flower, fruit, stolon, bulb, tuber, corm, keikis, shoot, or bud.

[0089] Plant health may be improved by treatment with a composition of the present invention, in particular compositions of the present invention comprising one or more endophytes. An “endophyte” is an organism capable of living on a plant element (e.g., rhizoplane or phyllosphere) or within a plant element, or on a surface in close physical proximity with a plant element, e.g., the phyllosphere and rhizosphere including soil surrounding roots. A “beneficial” endophyte does not cause disease or harm the host plant otherwise. Endophytes can occupy the intracellular or extracellular spaces of plant tissue, including the leaves, stems, flowers, fruits, seeds, or roots. An endophyte can be, for example, a bacterial or fungal organism, and can confer a beneficial property to the host plant such as an increase in yield, biomass, resistance, or fitness. An endophyte can be a fungus or a bacterium. As used herein, the term “microbe” is sometimes used to describe an endophyte. As used herein, the term “microbe” or “microorganism” refers to any species or taxon of microorganism, including, but not limited to, archaea, bacteria, microalgae, fungi (including mold and yeast species), mycoplasmas, microspores, nanobacteria, oomycetes, and protozoa. In some embodiments, a microbe or microorganism is an endophyte, for example a bacterial or fungal endophyte, which is capable of living within a plant.

[0090] The term “isolated” is intended to specifically reference an organism, cell, tissue, polynucleotide, or polypeptide that is removed from its original source and purified from additional components with which it was originally associated. For example, an endophyte may be considered isolated from a seed if it is removed from that seed source and purified so that it is isolated from one or more additional components with which it was originally associated. Similarly, an endophyte may be removed and purified from a plant or plant element so that it is isolated and no longer associated with its source plant or plant element.

[0091] As used herein, an isolated strain of a microbe is a strain that has been removed from its natural milieu. “Pure cultures” or “isolated cultures” are cultures in which the organisms present are only of one strain of a particular genus and species. This is in contrast to “mixed cultures,” which are cultures in which more than one genus and/or species of microorganism are present. As such, the term “isolated” does not necessarily reflect the extent to which the microbe has been purified. A “substantially pure culture” of the strain of microbe refers to a culture which contains substantially no other microbes than the desired strain or strains of microbe. In other words, a substantially pure culture of a strain of microbe is substantially free of other contaminants, which can include microbial contaminants. Further, as used herein, a “biologically pure” strain is intended to mean the strain was separated from materials with which it is normally associated in nature. A strain associated with other strains, or with compounds or materials that it is not normally found with in nature, is still defined as “biologically pure.” A monoculture of a particular strain is, of course, “biologically pure.” As used herein, the term “enriched culture” of an isolated microbial strain refers to a microbial culture that contains more than 50%, 60%, 70%, 80%, 90%, or 95% of the isolated strain.

[0092] A “population” of endophytes, or an “endophyte population”, refers to one or more endophytes that share a common genetic derivation, e.g., one or more propagules of a single endophyte, i.e., endophytes grown from a single picked colony. In some embodiments, a population refers to endophytes of identical taxonomy. In some cases, a population of endophytes refers to one or more endophytes of the same genus. In some cases, a population of endophytes refers to one or more endophytes of the same species or strain.

[0093] A “plurality of endophytes” means two or more types of endophyte entities, e.g., of bacteria or fungi, or combinations thereof. In some embodiments, the two or more types of endophyte entities are two or more individual endophytic organisms, regardless of genetic derivation or taxonomic relationship. In some embodiments, the two or more types of endophyte entities are two or more populations of endophytes. In other embodiments, the two or more types of endophyte entities are two or more species of endophytes. In yet other embodiments, the two or more types of endophyte entities are two or more genera of endophytes. In yet other embodiments, the two or more types of endophyte entities are two or more families of endophytes. In yet other embodiments, the two or more types of endophyte entities are two or more orders of endophytes. In yet other embodiments, the two or more types of endophyte entities are two or more classes of endophytes. In yet other embodiments, the two or more types of endophyte entities are two or more phyla of endophytes. In some embodiments, a plurality refers to three or more endophytes, either distinct individual organisms or distinct members of different genetic derivation or taxa. In some embodiments, a plurality refers to four or more either distinct individual endophytic organisms or distinct members of different genetic derivation or taxa. In some embodiments, a plurality refers to five or more, ten or more, or an even greater number of either distinct individual endophytic organisms or distinct members of different genetic derivation or taxa. In some embodiments, the term “consortium” or “consortia” may be used as a collective noun synonymous with “plurality”, when describing more than one population, species, genus, family, order, class, or phylum of endophytes.

[0094] In some embodiments, a treatment may comprise a modified microbe or plant or plant element. A microbe or plant or plant element is “modified” when it comprises an artificially introduced genetic or epigenetic modification. In some embodiments, the modification is introduced by genome engineering or genome editing technology. In some embodiments, genome engineering or editing utilizes non-homologous end joining (NHEJ), homology directed repair (HDR), or combinations thereof. In some embodiments, genome engineering or genome editing is carried out with a Class I or Class II clustered regulatory interspaced short palindromic repeats (CRISPR) system. In some embodiments, the CRISPR system is CRISPR/Cas9. In some embodiments, the CRISPR system is CRISPR/Cpf1. In some embodiments, the modification is introduced by a targeted nuclease. In some embodiments, targeted nucleases include, but are not limited to, transcription activator-like effector nuclease (TALEN), zinc finger nuclease (ZNF), Cas9, Cas9 variants, Cas9 homologs, Cpf1, Cpf1 variants, Cpf1 homologs, and combinations thereof. In some embodiments, the modification is an epigenetic modification. In some embodiments, the modification is introduced by treatment with a DNA methyltransferase inhibitor such as 5-azacytidine, or a histone deacetylase inhibitor such as 2-amino-7-methoxy-3H-phenoxazin-3-one. In some embodiments, the modification is introduced via tissue culture. In some embodiments, a modified microbe or plant or plant element comprises a transgene.

[0095] As used herein, the term “bacterium” or “bacteria” refers in general to any prokaryotic organism and may reference an organism from either Kingdom Eubacteria (Bacteria), Kingdom Archaebacteria (Archaea), or both. In some cases, bacterial genera have been reassigned due to various reasons (such as, but not limited to, the evolving field of whole genome sequencing), and it is understood that such nomenclature reassignments are within the scope of any claimed genus.

[0096] As used herein, the term “fungus” or “fungi” refers in general to any organism from Kingdom Fungi. Historical taxonomic classification of fungi has been according to morphological presentation. Beginning in the mid-1800's, it was recognized that some fungi have a pleomorphic life cycle, and that different nomenclature designations were being used for different forms of the same fungus. With the development of genomic sequencing, it became evident that taxonomic classification based on molecular phylogenetics did not align with morphological-based nomenclature (Shenoy B D, Jeewon R, Hyde K D. Impact of DNA sequence-data on the taxonomy of anamorphic fungi. Fungal Diversity 26 (10) 1-54. 2007). Systematics experts have not aligned on common nomenclature for all fungi, nor are all existing databases and information resources inclusive of updated taxonomies. As such, many fungi provided herein may be described by their anamorph form, but it is understood that based on identical genomic sequencing, any pleomorphic state of that fungus may be considered to be the same organism. In some cases, fungal genera have been reassigned due to various reasons, and it is understood that such nomenclature reassignments are within the scope of any claimed genus.

[0097] The degree of relatedness between microbes may be inferred from the sequence similarity of one or more homologous polynucleotide sequences of the microbes. In some embodiments, the one or more homologous polynucleotide sequences are marker genes. As used herein, the term “marker gene” refers to a conserved genomic region comprising sequence variation among related organisms. Examples of marker genes that may be used for the present invention, include but are not limited to: 16S ribosomal RNA gene (“16S”), internal transcribed spacer (“ITS”); fusA gene; largest subunit of RNA polymerase II (“RPB1”); second largest subunit of RNA polymerase II (“RPB2”); beta-tubulin or tubulin (“BTUB2” or “TUB2”); phosphoglycerate kinase (“PGK”); actin (“ACT”); long subunit rRNA gene (“LSU”); small subunit rRNA gene (“SSU”), 60S ribosomal protein L 10 (“60S_L10_L1”), atpD, Calmodulin (“CMD”), GDP gene (“GPD1_2”), etc.

[0098] The terms “sequence similarity”, “identity”, “percent identity”, “percent sequence identity” or “identical” in the context of polynucleotide sequences refer to the nucleotides in the two sequences that are the same when aligned for maximum correspondence. There are different algorithms known in the art that can be used to measure nucleotide sequence identity. Nucleotide sequence identity can be measured by a local or global alignment, preferably implementing an optimal local or optimal global alignment algorithm. For example, a global alignment may be generated using an implementation of the Needleman-Wunsch algorithm (Needleman, S. B. & Wunsch, C. D. (1970) Journal of Molecular Biology. 48 (3): 443-53). For example, a local alignment may be generated using an implementation of the Smith-Waterman algorithm (Smith T. F & Waterman, M. S. (1981) Journal of Molecular Biology. 147 (1): 195-197). Optimal global alignments using the Needleman-Wunsch algorithm and optimal local alignments using the Smith-Waterman algorithm are implemented in USEARCH, for example USEARCH version v8.1.1756_i86osx32.

[0099] A gap is a region of an alignment wherein a sequence does not align to a position in the other sequence of the alignment. A terminal gap is a region beginning at the end of a sequence in an alignment wherein the nucleotide in the terminal position of that sequence does not correspond to a nucleotide position in the other sequence of the alignment and extending for all contiguous positions in that sequence wherein the nucleotides of that sequence do not correspond to a nucleotide position in the other sequence of the alignment. An internal gap is a gap in an alignment which is flanked on the 3′ and 5′ end by positions wherein the aligned sequences are identical. In global alignments, terminal gaps are discarded before identity is calculated. For both local and global alignments, internal gaps are counted as differences.

[0100] In some embodiments, the nucleic acid sequence to be aligned is a complete gene. In some embodiments, the nucleic acid sequence to be aligned is a gene fragment. In some embodiments, the nucleic acid sequence to be aligned is an intergenic sequence. In a preferred embodiment, inference of homology from a sequence alignment is made where the region of alignment is at least 85% of the length of the query sequence.

[0101] The term “substantial homology” or “substantial similarity,” when referring to a polynucleotide sequence or fragment thereof, indicates that, when optimally aligned with appropriate nucleotide insertions or deletions with another polynucleotide sequence (or its complementary strand), there is nucleotide sequence identity in at least about 76%, 80%, 85%, or at least about 90%, or at least about 95%, 96%, at least 97%, 98%, 99% or 100% of the positions of the alignment, wherein the region of alignment is at least about 50%, 60%, 70%, 75%, 85%, or at least about 90%, or at least about 95%, 96%, 97%, 98%, 99% or 100% of the length of the query sequence. In a preferred embodiment, the region of alignment contains at least 100 positions inclusive of any internal gaps. In some embodiments, the region of alignment comprises at least 100 nucleotides of the query sequence. In some embodiments, the region of alignment comprises at least 200 nucleotides of the query sequence. In some embodiments, the region of alignment comprises at least 300 nucleotides of the query sequence. In some embodiments, the region of alignment comprises at least 400 nucleotides of the query sequence. In some embodiments, the region of alignment comprises at least 500 nucleotides of the query sequence. In some embodiments, the terminal nucleotides are trimmed from one or both ends of the sequence prior to alignment. In some embodiments, at least the terminal 10, 15, 20, 25, 30, between 20-30, 35, 40, 45, 50, between 25-50 nucleotides are trimmed from the sequence prior to alignment.

### Synthetic Compositions for Improving Plant Health

[0102] In some embodiments, a synthetic composition comprises one or more endophytes capable of improving plant health. A “synthetic composition” comprises one or more endophytes combined by human endeavor with a heterologously disposed plant element or a treatment formulation, said combination which is not found in nature. In some embodiments, a synthetic composition comprises one or more plant elements or formulation components combined by human endeavor with an isolated, purified endophyte composition. In some embodiments, synthetic composition refers to a plurality of endophytes in a treatment formulation comprising additional components with which said endophytes are not found in nature. An endophyte is “heterologously disposed” when mechanically or manually applied, artificially inoculated or disposed onto or into a plant element, seedling, plant or onto or into a plant growth medium or onto or into a treatment formulation so that the endophyte exists on or in the plant element, seedling, plant, plant growth medium, or formulation in a manner not found in nature prior to the application of the treatment, e.g., said combination which is not found in nature in that plant variety, at that time in development, in that tissue, in that abundance, or in that growth condition (for example, drought, flood, cold, nutrient deficiency, etc.).

[0103] A “treatment formulation” refers to one or more compositions that facilitate the stability, storage, and/or application of one or more endophytes. Treatment formulations may comprise any one or more agents such as: a surfactant, a buffer, a tackifier, a microbial stabilizer, an antimicrobial, a fungicide, an anticomplex agent, an herbicide, a nematicide, an insecticide, a plant growth regulator, a rodenticide, a desiccant, a nutrient, an excipient, a wetting agent, a salt, a polymer. As used herein as a noun, a “treatment” may comprise one or more endophytes.

[0104] In some embodiments, a treatment formulation may comprise one or more polymeric beads comprising one or more endophytes. In some embodiments, a treatment formulation may consist of one or more polymeric beads comprising one or more endophytes. A polymeric bead may contain a biodegradable polymer such as alginate, agarose, agar, gelatin, polyacrylamide, chitosan, and polyvinyl alcohol. In some embodiments, the polymeric beads are less than 500 μm in diameter at their widest point. In some embodiments, the polymeric beads' average diameter at their widest point is between 500 μm and 250 μm, between 249 μm and 100 μm, 100 μm or less, between 100 μm and 50 μm, or 50 μm or less.

[0105] In some embodiments, an “agriculturally compatible carrier” can be used to formulate an agricultural formulation or other composition that includes a purified endophyte preparation. As used herein an “agriculturally compatible carrier” refers to any material, other than water, that can be added to a plant element without causing or having an adverse effect on the plant element (e.g., reducing seed germination) or the plant that grows from the plant element, or the like.

[0106] In some embodiments, the formulation can include a tackifier or adherent. Such agents are useful for combining the bacterial population of the invention with carriers that can contain other compounds (e.g., control agents that are not biologic), to yield a coating composition. Such compositions help create coatings around the plant or seed to maintain contact between the microbe and other agents with the plant or plant part. In some embodiments, adherents are selected from the group consisting of: alginate, gums, starches, lecithins, formononetin, polyvinyl alcohol, alkali formononetinate, hesperetin, polyvinyl acetate, cephalins, Gum Arabic, Xanthan Gum, Mineral Oil, Polyethylene Glycol (PEG), Polyvinyl pyrrolidone (PVP), Arabino-galactan, Methyl Cellulose, PEG 400, Chitosan, Polyacrylamide, Polyacrylate, Polyacrylonitrile, Glycerol, Triethylene glycol, Vinyl Acetate, Gellan Gum, Polystyrene, Polyvinyl, Carboxymethyl cellulose, Gum Ghatti, and polyoxyethylene-polyoxybutylene block copolymers.

[0107] The formulation can also contain a surfactant. Non-limiting examples of surfactants include nitrogen-surfactant blends such as Prefer 28 (Cenex), Surf-N(US), Inhance (Brandt), P-28 (Wilfarm) and Patrol (Helena); esterified seed oils include Sun-It II (AmCy), MSO (UAP), Scoil (Agsco), Hasten (Wilfarm) and Mes-100 (Drexel); and organo-silicone surfactants include Silwet L77 (UAP), Silikin (Terra), Dyne-Amie (Helena), Kinetic (Helena), Sylgard 309 (Wilbur-Ellis) and Century (Precision). In one embodiment, the surfactant is present at a concentration of between 0.01% v/v to 10% v/v. In another embodiment, the surfactant is present at a concentration of between 0.1% v/v to 1% v/v.

[0108] In certain cases, the formulation includes a microbial stabilizer. Such an agent can include a desiccant. As used herein, a “desiccant” can include any compound or mixture of compounds that can be classified as a desiccant regardless of whether the compound or compounds are used in such concentrations that they in fact have a desiccating effect on the liquid inoculant. Such desiccants are ideally compatible with the bacterial population used, and should promote the ability of the microbial population to survive application on the seeds and to survive desiccation. Examples of suitable desiccants include one or more of trehalose, sucrose, glycerol, and Methylene glycol. Other suitable desiccants include, but are not limited to, non reducing sugars and sugar alcohols (e.g., mannitol or sorbitol). The amount of desiccant introduced into the formulation can range from about 5% to about 50% by weight/volume, for example, between about 10% to about 40%, between about 15% and about 35%, or between about 20% and about 30%.

[0109] In some embodiments the formulation includes, for example, solid carriers such as talc, fullers earth, bentonite, kaolin clay, pyrophyllite, bentonite, montmorillonite, diatomaceous earth, acid white soil, vermiculite, and pearlite, and inorganic salts such as ammonium sulfate, ammonium phosphate, ammonium nitrate, urea, ammonium chloride, and calcium carbonate. Also, organic fine powders such as wheat flour, wheat bran, and rice bran maybe used. The liquid carriers include vegetable oils such as soybean oil and cottonseed oil, glycerol, ethylene glycol, polyethylene glycol, propylene glycol, polypropylene glycol, etc.

[0110] In some embodiments, the abundance of an endophyte can be estimated by methods well known in the art including, but not limited to, qPCR, community sequencing, flow cytometry, and/or counting colony-forming units. As used herein, a “colony-forming unit” (“CFU”) is used as a measure of viable microorganisms in a sample. A CFU is an individual viable cell capable of forming on a solid medium a visible colony whose individual cells are derived by cell division from one parental cell.

[0111] In some embodiments, the synthetic composition of the present invention comprises one or more of the following: antimicrobial, fungicide, nematicide, bactericide, insecticide, or herbicide.

[0112] In some embodiments, a treatment is applied mechanically or manually or artificially inoculated to a plant element in a seed treatment, root wash, seedling soak, foliar application, floral application, soil inoculum, in-furrow application, sidedress application, soil pre-treatment, wound inoculation, drip tape irrigation, vector-mediation via a pollinator, injection, osmopriming, hydroponics, aquaponics, aeroponics, and combinations thereof. Application to the plant may be achieved, for example, as a powder for surface deposition onto plant leaves, as a spray to the whole plant or selected plant element, as part of a drip to the soil or the roots, or as a coating onto the plant element prior to or after planting. Such examples are meant to be illustrative and not limiting to the scope of the invention.

[0113] In some embodiments, the invention described herein provides a synthetic composition comprising one or more endophytes capable of improving plant health, wherein the one or more endophytes is a member of the Class Gammaproteobacteria. In some embodiments, the one or more endophytes is a member of the Order Enterobacterales. In some embodiments, the one or more endophytes is a member of the Family Enterobacteriaceae. In some embodiments, the one or more endophytes is a member of the Genus Kosakonia. In some embodiments, the one or more sequences are selected from Table 2A or Table 2B. In some embodiments, the one or more endophytes comprise one or more polynucleotide sequences at least 95%, at least 96%, at least 97%, at least 97%, at least 98%, at least 99%, or 100% identical to one or more of SEQ ID NOs. 1-1089. In some embodiments, the one or more endophytes are capable of producing a protein whose amino acid sequence is at least 95%, at least 96%, at least 97%, at least 97%, at least 98%, at least 99%, or 100% identical to one or more of SEQ ID NOs. 1090-2051.

[0114] In some embodiments of any of the synthetic compositions described herein, the endophytes comprise at least 2, 3, 4, 5, 6, 7, 8, 9, 10, 15, 20, 25, 30, 35, 40, 45, 50, 55, 60, 65, 70, 75, 80, or all of the polynucleotide sequences having SEQ ID NOs. 1-1089. In some embodiments of any of the synthetic compositions described herein, the endophytes are capable of producing at least 2, 3, 4, 5, 6, 7, 8, 9, 10, 15, 20, 25, 30, 35, 40, 45, 50, 55, 60, 65, 70, 75, 80, or all of the proteins having amino acid sequences selected from SEQ ID NOs. 1090-2051.

[0115] In some embodiments of any of the synthetic compositions described herein, the endophytes comprise at least 2, 3, 4, 5, 6, 7, 8, 9, 10, 15, 20, 25, 30, 35, 40, 45, 50, 55 genes of a tailocin gene cluster, where the genes have 97% identity or greater to one or more polynucleotide sequences SEQ ID NOs. 287-933. In some embodiments of any of the synthetic compositions described herein, the endophytes are capable of producing at least 2, 3, 4, 5, 6, 7, 8, 9, 10, 15, 20, 25, 30, 35, 40, 45, 50, 55 of the tailocin proteins having amino acid sequences selected from SEQ ID NOs. 1318-1922.

[0116] In some embodiments of any of the synthetic compositions described herein, the endophytes comprise at least 2, 3, 4, 5, 6, 7, 8, 9 genes of a Type VI secretion system, where the genes have 97% identity or greater to one or more polynucleotide sequences SEQ ID NOs. 934-1014. In some embodiments of any of the synthetic compositions described herein, the endophytes are capable of producing at least 2, 3, 4, 5, 6, 7, 8, 9 of the Type VI secretion system proteins having amino acid sequences selected from SEQ ID NOs. 1923-1981.

[0117] In some embodiments of any of the synthetic compositions described herein, the endophytes comprise at least 2, 3, 4, 5, 6, 7, 8, 9 Type VI secretion system putative effector genes, where the genes have 97% identity or greater to one or more polynucleotide sequences SEQ ID NOs. 1015-1089. In some embodiments of any of the synthetic compositions described herein, the endophytes are capable of producing at least 2, 3, 4, 5, 6, 7, 8, 9 Type VI secretion system putative effector proteins having amino acid sequences selected from SEQ ID NOs. 1982-2051.

[0118] In some embodiments of any of the synthetic compositions described herein, the endophytes comprise at least 2, 3, 4, 5, 6, 7, 8, 9 flagellin genes, where the genes have 97% identity or greater to one or more polynucleotide sequences SEQ ID NOs. 1-239. In some embodiments of any of the synthetic compositions described herein, the endophytes are capable of producing at least 2, 3, 4, 5, 6, 7, 8, 9 of the flagellin proteins having amino acid sequences selected from SEQ ID NOs. 1090-1272.

[0119] In some embodiments of any of the synthetic compositions described herein, the endophytes comprise at least 2, 3, 4, 5, 6, 7, 8, 9 O-Antigen biosynthesis genes, where the genes have 97% identity or greater to one or more polynucleotide sequences SEQ ID NOs. 240-253. In some embodiments of any of the synthetic compositions described herein, the endophytes are capable of producing at least 2, 3, 4, 5, 6, 7, 8, 9 of the O-Antigen biosynthesis proteins having amino acid sequences selected from SEQ ID NOs. 1273-1285.

[0120] In some embodiments of any of the synthetic compositions described herein, the endophytes comprise at least 2, 3, 4, 5, 6, 7, 8, 9 pseudaminic acid biosynthesis genes, where the genes have 97% identity or greater to one or more polynucleotide sequences SEQ ID NOs. 254-286. In some embodiments of any of the synthetic compositions described herein, the endophytes are capable of producing at least 2, 3, 4, 5, 6, 7, 8, 9 of the pseudaminic acid biosynthesis proteins having amino acid sequences selected from SEQ ID NOs. 1286-1317.

[0121] In some embodiments of any of the synthetic compositions described herein, the endophytes comprise 1) at least 1, 2, 3, 4, 5, 6, 7, 8, 9, 10, 15, 20, 25, 30, 35, 40, 45, 50, 55 genes of a tailocin gene cluster where the genes have 97% identity or greater to one or more polynucleotide sequences SEQ ID NOs. 287-933, 2) at least 1, 2, 3, 4, 5, 6, 7, 8, 9 genes of a Type VI secretion system where the genes have 97% identity or greater to one or more polynucleotide sequences SEQ ID NOs. 934-1014, 3) at least 1, 2, 3, 4, 5, 6, 7, 8, 9 flagellin genes where the genes have 97% identity or greater to one or more polynucleotide sequences SEQ ID NOs. 1-239, 4) at least 1, 2, 3, 4, 5, 6, 7, 8, 9 O-Antigen biosynthesis genes, where the genes have 97% identity or greater to one or more polynucleotide sequences SEQ ID NOs. 240-253, 5) at least 1, 2, 3, 4, 5, 6, 7, 8, 9 pseudaminic acid biosynthesis genes, where the genes have 97% identity or greater to one or more polynucleotide sequences SEQ ID NOs. 254-286, and 6). at least 1, 2, 3, 4, 5, 6, 7, 8, 9 Type VI secretion system putative effector genes where the genes have 97% identity or greater to one or more polynucleotide sequences SEQ ID NOs. 1015-1089.

[0122] In some embodiments of any of the synthetic compositions described herein, the synthetic compositions comprise at least 2, 3, 4, 5, 6, 7, 8, 9, 10, 15 or 20 or more endophytes. In some embodiments, the one or more endophytes comprise at least 2, 3, 4, 5, 6, 7, 8, 9, 10, 15 or 20 or more endophytes. In some embodiments, the one or more endophytes are distinct individual organisms or distinct members of different genetic derivation or taxa.

### Methods for Improving Plant Health

[0123] In some embodiments, the invention provides methods of improving plant health comprising heterologously disposing one or more endophytes to a plant element in an effective amount to increase a trait of agronomic importance in the plant derived from the treated plant element relative to a plant derived from a reference plant element. In some embodiments, the one or more endophytes are a component of a treatment formulation. In some embodiments, the one or more endophytes are a component of a synthetic composition.

[0124] In some embodiments, the invention provides methods of improving plant health comprising creating any of the synthetic compositions described herein, wherein the synthetic composition comprises any of the plant elements of any of the plants described herein and any of the one or more endophytes described herein. In some embodiments, the synthetic composition comprises any of the treatment formulations described herein and any of the one or more endophytes described herein. In some embodiments, the synthetic composition additionally comprises a growth medium or growth environment. A growth environment is a natural or artificially constructed surrounding capable of supporting life of a plant. In some embodiments, the growth medium is soil. In some embodiments, the growth medium is a culture fluid suitable for propagation of an endophyte or plant tissue culture. In some embodiments, the method comprises a step of applying the synthetic composition to a growth medium. In some embodiments, the synthetic composition is applied before one or more plant elements are placed in or on the growth medium. In some embodiments, the synthetic composition is applied after one or more plant elements are placed in or on the growth medium. In some embodiments, the method comprises a step of germinating the plants. In some embodiments, the method comprises a step of growing the plants. For example, the plants may be grown in the plant vigor assays, greenhouse assessments, or field trials described herein. In some embodiments, the method comprises a step of growing the plants to maturity. In some embodiments, where the plants are commercially produced, maturity is the stage at which the plant is normally harvested.

[0125] In some embodiments of any of the methods described herein, plant health may be improved for plants in a stress condition. In some embodiments, the stress condition is a biotic or abiotic stress, or a combination of one or more biotic or abiotic stresses. In some embodiments of any of the methods described herein, the stress condition is an abiotic stress selected from the group consisting of: drought stress, salt stress, metal stress, heat stress, cold stress, low nutrient stress (alternately referred to herein as nutrient deficiency or growth in nutrient deficient conditions), and excess water stress, and combinations thereof. In some embodiments of any of the methods described herein, the stress condition is a biotic stress selected from the group consisting of: insect infestation, nematode infestation, complex infection, fungal infection, bacterial infection, oomycete infection, protozoal infection, viral infection, herbivore grazing, and combinations thereof. Stress tolerance is exemplified by improvement of one or more other traits of agronomic importance when compared with a reference plant, reference plant element, or reference population. For example, biotic stress tolerance may be shown by decreased pathogen load of tissues, decreased area of chlorotic tissue, decreased necrosis, improved growth, increased survival, increased biomass, increased shoot height, increased root length, etc. relative to a reference.

### EXAMPLES

### Example 1. Isolation and Identification of Endophytes

[0126] Endophytes of the present invention were isolated from the sources listed in Table 1.

TABLE 1
Sources of microbes of the present invention

| | | Isolation |
|---|---|---|
| MIC-ID | Isolated From | Tissue |
| MIC-70076 | Zea mays L. subsp. mays Kokoma | Surface |
| | (landrace maize), obtained from | sterilized |
| | USDA North Central Regional PI | seeds |
| | Station, PI 213733 | |
| MIC-24837 | Glycine max (Soybeans) in flood | |
| | conditions | |
| MIC-61954 | Gossypium hirsutum (Cotton) in | |
| | disease-stress conditions | |
| MIC-81265 | Zea mays (Corn) in temperate | |
| | climate, cold-stress conditions | |
| MIC-73019 | Modern commercial Zea mays | Surface |
| | (Corn) | sterilized |
| | | seeds |
| MIC-52924 | Glycine max (Soybeans) in | |
| | temperate climate, flood conditions | |
| MIC-94458 | Avena sativa (Oats) from | |
| | temperate climate | |
| MIC-46385 | Avena sativa (Oats) from | |
| | temperate climate | |
| MIC-62164 | Avena sativa (Oats) from | |
| | temperate climate | |
| MIC-30352 | Avena sativa (Oats) from | |
| | temperate climate | |
| MIC-82867 | Avena sativa (Oats) from | |
| | temperate climate | |
| MIC-84492 | Glycine max (Soybeans) in | |
| | temperate climate, cold-stress conditions | |
| MIC-85267 | Glycine max (Soybeans) in | |
| | temperate climate, low nutrient conditions | |
| MIC-50391 | Glycine max (Soybeans) in | |
| | temperate climate, nematode-stress conditions | |
| MIC-69701 | Glycine max (Soybeans) in | |
| | temperate climate, nematode-stress conditions | |
| MIC-19814 | Glycine max (Soybeans) from | Seed- |
| | temperate climate | associated |
| MIC-55579 | Glycine max (Soybeans) in | |
| | flood conditions | |
| MIC-80455 | Gossypium hirsutum (Cotton) | |
| MIC-87588 | Gossypium hirsutum (Cotton) | |
| MIC-86605 | Gossypium hirsutum (Cotton) | |
| MIC-54642 | Gossypium hirsutum (Cotton) | |
| MIC-29662 | Gossypium hirsutum (Cotton) in | |
| | disease-stress conditions | |
| MIC-87198 | Gossypium hirsutum (Cotton) in | |
| | drought conditions | |
| MIC-36254 | Gossypium hirsutum (Cotton) in | |
| | temperate climate, low nutrient conditions | |
| MIC-73547 | Gossypium hirsutum (Cotton) in | |
| | temperate climate, low nutrient conditions | |
| MIC-94504 | Gossypium hirsutum (Cotton) in | |
| | drought conditions | |
| MIC-68773 | Malva parvifolia (cheeseweed) | |
| | from temperate climate | |
| MIC-83740 | Malva parvifolia (cheeseweed) | |
| | from temperate climate | |
| MIC-54778 | Phaseolus vulgaris (Kidney bean) | Seed- |
| | from temperate climate | associated |
| MIC-14970 | Sorghum bicolor (Sorghum) from | |
| | temperate climate | |
| MIC-11290 | Sorghum bicolor (Sorghum) from | |
| | temperate climate | |
| MIC-19845 | Zea mays (Corn) in temperate | |
| | climate, cold-stress conditions | |
| MIC-88834 | Zea mays (Corn) in temperate | |
| | climate, cold-stress conditions | |
| MIC-87084 | Zea mays (Corn) in temperate | |
| | climate, insect-stress conditions | |
| MIC-36497 | Zea mays (Corn) in temperate | |
| | climate, insect-stress conditions | |
| MIC-90405 | Zea mays (Corn) in temperate | |
| | climate, low nutrient conditions | |
| MIC-75437 | Zea mays (Corn) in temperate | |
| | climate, low nutrient conditions | |
| MIC-14439 | Zea mays (Corn) in temperate | |
| | climate, low nutrient conditions | |
| MIC-38993 | Zea mays (Corn) in temperate | |
| | climate, low nutrient conditions | |
| MIC-20446 | Zea mays (Corn) in temperate | |
| | climate, low nutrient conditions | |
| MIC-94135 | Zea mays (Corn) in temperate | |
| | climate, low nutrient conditions | |
| MIC-29285 | Zea mays (Corn) in temperate | |
| | climate, flood conditions | |
| MIC-82689 | Zea mays (Corn) in temperate | |
| | climate, flood conditions | |
| MIC-83010 | Zea mays L. subsp. mays | Seed |
| | P39 Goodman-Buckler (modern maize), | surface |
| | obtained from USDA North Central | |
| | Regional PI Station, Ames 28186 PI 690333 | |
| MIC-79613 | Zea mays L. subsp. parviglumis | Surface |
| | (Teosinte), obtained from USDA North | sterilized |
| | Central Regional PI Station, PI 384062 | seeds |
| MIC-53518 | Zea mays L. subsp. parviglumis | Surface |
| | (Teosinte), obtained from USDA North | sterilized |
| | Central Regional PI Station, PI 384062 | seeds |
| MIC-82330 | Wrens Abruzzi Winter Rye, Secale cereale | Surface |
| | | sterilized |
| | | seeds |
| MIC-68901 | Glycine max (Soybeans) from | Seed- |
| | temperate climate | associated |
| MIC-87894 | Glycine max (Soybeans) in | |
| | temperate climate, flood conditions | |

[0127] Each sample was processed independently. Each sample was washed in a dilute water and detergent solution; tissue was collected from plants. Samples were surface sterilized by successive rinses: 2 minutes in 10% bleach solution, 2 minutes in 70% ethanol solution, and a rinse with sterile water. The series of rinses was repeated 3 times. The plant tissue was cut into small pieces with sterile scissors and blended with 3, 7 mm steel beads in 5-7.5 ml phosphate buffered solution (PBS). DNA was extracted from the ground tissues using the Magbind Plant DNA kit (Omega, Norcross, Georgia, USA) according to the manufacturer's instructions.

[0128] The endophytes were characterized by whole genome sequencing.

[0129] Phylogenetic and genomic analyses for bacterial strains. According to the manufacturer's protocol, DNA was extracted from pure cultures using the Omega Mag-Bind Universal Pathogen Kit with a final elution volume of 60 μl (Omega Biotek Inc., Norcross, GA). DNA samples were quantified using a Qubit fluorometer (ThermoFisher Scientific, Waltham, MA) and normalized to 100 ng. DNA was prepared using the Nextera DNA Flex Library Prep Kit according to the manufacturer's instructions (Illumina Inc., San Diego, CA). DNA libraries were quantified via qPCR using the KAPA Library Quantification kit (Roche Sequencing and Life Science, Wilmington, MA) and combined in equimolar concentrations into one 24-sample pool. Libraries were sequenced on a MiSeq using pair-end reads (2×200 bp). Reads were trimmed of adapters and low-quality bases using Cutadapt (version 1.9.1) and assembled into contigs using MEGAHIT (version 1.1.2) (Li, D., Liu, C.-M., Luo, R., Sadakane, K., and Lam, T.-W. 2015. MEGAHIT: an ultra-fast single-node solution for large and complex metagenomics assembly via succinct de Bruijn graph. Bioinformatics. 31:1674-1676). Reads were mapped to contigs using Bowtie2 (version 2.3.4) (Langmead, B., and Salzberg, S. L. 2012. Fast gapped-read alignment with bowtie 2. Nat Methods. 9 Available at: doi.org/10.1038/nmeth.1923), and contigs were assembled into scaffolds using BESST (2.2.8) (Sahlin, K., Vezzi, F., Nystedt, B., Lundeberg, J., and Arvestad, L. 2014. BESST-efficient scaffolding of large fragmented assemblies. BMC bioinformatics. 15:281).

[0130] Genes for phylogenetic analyses were extracted from genome assemblies using barrnap (Seemann, T. 2019. barrnap 0.9: rapid ribosomal RNA prediction. Available at: github.com/tseemann/barrnap) or blast (Altschul, S. F., Madden, T. L., Schäffer, A. A., Zhang, J., Zhang, Z., Miller, W., et al. 1997. Gapped BLAST and PSI-BLAST: A new generation of protein database search programs. Nucleic Acids Research. 25:3389-3402). Homologous DNA sequences from types or other, likely correctly identified strains were retrieved from GenBank and aligned using MAFFT (Katoh, K., and Standley, D. M. 2013. MAFFT multiple sequence alignment software version 7: improvements in performance and usability. Molecular Biology and Evolution. 30:772-780), or other software. Single or multilocus phylogenetic analyses were performed using PAUP (Swofford, D. L. 2002. PAUP: Phylogenetic Analysis Using Parsimony (and Other Methods). Version 4. Sunderland, Massachusetts: Sinauer Associates) or similar software.

[0131] 16S rRNA gene sequences were extracted from genome assemblies using barrnap (Seemann 2019). Phylogenomic analyses were performed using GToTree (Lee, M. D. 2019. Applications and considerations of GToTree: a user-friendly workflow for phylogenomics. Evolutionary Bioinformatics. 15:1176934319862245) with default settings. Average nucleotide identity analyses were performed using the pyani ANIm algorithm (Richter, M., and Rosselló-Móra, R. 2009. Shifting the genomic gold standard for the prokaryotic species definition. Proceedings of the National Academy of Sciences. 106:19126-19131) implemented in the MUMmer package (Kurtz, S., Phillippy, A., Delcher, A. L., Smoot, M., Shumway, M., Antonescu, C., et al. 2004. Versatile and open software for comparing large genomes. Genome biology. 5: R12) retrieved from github.com/widdowquinn/pyani.

[0132] Identification of bacterial strains. Bacteria are identified at the species level, if its average nucleotide identity (ANI) was >95% to the genome of a single species represented by its type strain downloaded from GenBank. Phylogenomic analyses were also performed if a bacteria had >1 species with >95% ANI, or the gap between the top two ANI hits was <3%, in this case, the bacteria is identified at the genus and species if it had a single sister group with >70% bootstrap support.

[0133] All bacteria of the present invention were identified as Kingdom: Bacteria, Phylum: Proteobacteria, Class: Gammaproteobacteria, Order: Enterobacterales, Family: Enterobacteriaceae, Genus: Kosakonia, Species: cowanii.

[0134] MIC-70076 was deposited with as Deposit ID.

TABLE 2A
Polynucleotide sequences of endophytes

| SEQ ID | Sequence Description | Endophytes |
|---|---|---|
| 1 | Flagellin | MIC-70076 |
| 2 | Flagellin | MIC-70076 |
| 3 | Flagellin | MIC-70076 |
| 4 | Flagellin | MIC-70076 |
| 5 | Flagellin | MIC-70076 |
| 6 | Flagellin | MIC-70076 |
| 7 | Flagellin | MIC-70076 |
| 8 | Flagellin | MIC-70076 |
| 9 | Flagellin | MIC-80455, MIC-87588, MIC-86605, |
| | | MIC-54642, MIC-24837, MIC-55579, |
| | | MIC-61954, MIC-29662, MIC-38993, |
| | | MIC-14970, MIC-11290, MIC-82689 |
| 10 | Flagellin | MIC-68901, MIC-81265, MIC-88834, |
| | | MIC-46385 |
| 11 | Flagellin | MIC-68773, MIC-86605, MIC-54642, |
| | | MIC-61954, MIC-29662, MIC-11290 |
| 12 | Flagellin | MIC-87588, MIC-86605, MIC-54642, |
| | | MIC-61954, MIC-29662 |
| 13 | Flagellin | MIC-87588, MIC-86605, MIC-54642, |
| | | MIC-61954, MIC-29662 |
| 14 | Flagellin | MIC-70076, MIC-73019, MIC-73547 |
| 15 | Flagellin | MIC-70076, MIC-73019, MIC-73547 |
| 16 | Flagellin | MIC-70076, MIC-73019, MIC-73547 |
| 17 | Flagellin | MIC-68773, MIC-86605, MIC-61954, |
| | | MIC-29662, MIC-11290 |
| 18 | Flagellin | MIC-87588, MIC-86605, MIC-61954, |
| | | MIC-29662, MIC-14970, MIC-11290 |
| 19 | Flagellin | MIC-81265 |
| 20 | Flagellin | MIC-61954 |
| 21 | Flagellin | MIC-61954 |
| 22 | Flagellin | MIC-61954 |
| 23 | Flagellin | MIC-61954 |
| 24 | Flagellin | MIC-68901 |
| 25 | Flagellin | MIC-68901 |
| 26 | Flagellin | MIC-68901 |
| 27 | Flagellin | MIC-68901 |
| 28 | Flagellin | MIC-52924 |
| 29 | Flagellin | MIC-73019, MIC-73547 |
| 30 | Flagellin | MIC-73019, MIC-73547 |
| 31 | Flagellin | MIC-73019, MIC-73547 |
| 32 | Flagellin | MIC-73019, MIC-73547 |
| 33 | Flagellin | MIC-82330 |
| 34 | Flagellin | MIC-82330 |
| 35 | Flagellin | MIC-82330 |
| 36 | Flagellin | MIC-82330 |
| 37 | Flagellin | MIC-82330 |
| 38 | Flagellin | MIC-82330 |
| 39 | Flagellin | MIC-68773 |
| 40 | Flagellin | MIC-68773 |
| 41 | Flagellin | MIC-68773 |
| 42 | Flagellin | MIC-68773 |
| 43 | Flagellin | MIC-68773 |
| 44 | Flagellin | MIC-68773 |
| 45 | Flagellin | MIC-68773 |
| 46 | Flagellin | MIC-54778 |
| 47 | Flagellin | MIC-54778 |
| 48 | Flagellin | MIC-54778 |
| 49 | Flagellin | MIC-54778 |
| 50 | Flagellin | MIC-54778 |
| 51 | Flagellin | MIC-19814 |
| 52 | Flagellin | MIC-19814 |
| 53 | Flagellin | MIC-87588 |
| 54 | Flagellin | MIC-87588 |
| 55 | Flagellin | MIC-24837 |
| 56 | Flagellin | MIC-24837 |
| 57 | Flagellin | MIC-87198 |
| 58 | Flagellin | MIC-87198 |
| 59 | Flagellin | MIC-87198 |
| 60 | Flagellin | MIC-87198 |
| 61 | Flagellin | MIC-87198 |
| 62 | Flagellin | MIC-87198 |
| 63 | Flagellin | MIC-87198 |
| 64 | Flagellin | MIC-90405 |
| 65 | Flagellin | MIC-90405 |
| 66 | Flagellin | MIC-90405 |
| 67 | Flagellin | MIC-90405 |
| 68 | Flagellin | MIC-90405 |
| 69 | Flagellin | MIC-90405 |
| 70 | Flagellin | MIC-90405 |
| 71 | Flagellin | MIC-90405 |
| 72 | Flagellin | MIC-87894 |
| 73 | Flagellin | MIC-14970 |
| 74 | Flagellin | MIC-14970 |
| 75 | Flagellin | MIC-54642 |
| 76 | Flagellin | MIC-54642 |
| 77 | Flagellin | MIC-88834 |
| 78 | Flagellin | MIC-88834 |
| 79 | Flagellin | MIC-88834 |
| 80 | Flagellin | MIC-14439 |
| 81 | Flagellin | MIC-14439 |
| 82 | Flagellin | MIC-14439 |
| 83 | Flagellin | MIC-14439 |
| 84 | Flagellin | MIC-14439 |
| 85 | Flagellin | MIC-14439 |
| 86 | Flagellin | MIC-79613 |
| 87 | Flagellin | MIC-79613 |
| 88 | Flagellin | MIC-79613 |
| 89 | Flagellin | MIC-79613 |
| 90 | Flagellin | MIC-79613, MIC-53518 |
| 91 | Flagellin | MIC-79613, MIC-53518 |
| 92 | Flagellin | MIC-79613, MIC-53518 |
| 93 | Flagellin | MIC-53518 |
| 94 | Flagellin | MIC-53518 |
| 95 | Flagellin | MIC-53518 |
| 96 | Flagellin | MIC-53518 |
| 97 | Flagellin | MIC-82330, MIC-84492 |
| 98 | Flagellin | MIC-82330, MIC-84492 |
| 99 | Flagellin | MIC-83010 |
| 100 | Flagellin | MIC-83010 |
| 101 | Flagellin | MIC-83010 |
| 102 | Flagellin | MIC-83010, MIC-75437 |
| 103 | Flagellin | MIC-83010, MIC-75437, MIC-20446 |
| 104 | Flagellin | MIC-83740 |
| 105 | Flagellin | MIC-83740 |
| 106 | Flagellin | MIC-83740 |
| 107 | Flagellin | MIC-83740 |
| 108 | Flagellin | MIC-83740 |
| 109 | Flagellin | MIC-83740 |
| 110 | Flagellin | MIC-83740 |
| 111 | Flagellin | MIC-83740 |
| 112 | Flagellin | MIC-83740 |
| 113 | Flagellin | MIC-80455 |
| 114 | Flagellin | MIC-80455 |
| 115 | Flagellin | MIC-80455 |
| 116 | Flagellin | MIC-80455 |
| 117 | Flagellin | MIC-80455 |
| 118 | Flagellin | MIC-80455 |
| 119 | Flagellin | MIC-86605 |
| 120 | Flagellin | MIC-86605 |
| 121 | Flagellin | MIC-86605 |
| 122 | Flagellin | MIC-54642, MIC-11290 |
| 123 | Flagellin | MIC-94504 |
| 124 | Flagellin | MIC-94504 |
| 125 | Flagellin | MIC-94504 |
| 126 | Flagellin | MIC-94504 |
| 127 | Flagellin | MIC-94504 |
| 128 | Flagellin | MIC-94504 |
| 129 | Flagellin | MIC-94504 |
| 130 | Flagellin | MIC-24837, MIC-55579 |
| 131 | Flagellin | MIC-24837, MIC-55579 |
| 132 | Flagellin | MIC-24837, MIC-55579 |
| 133 | Flagellin | MIC-24837, MIC-55579 |
| 134 | Flagellin | MIC-55579 |
| 135 | Flagellin | MIC-55579 |
| 136 | Flagellin | MIC-55579 |
| 137 | Flagellin | MIC-55579 |
| 138 | Flagellin | MIC-29662, MIC-11290 |
| 139 | Flagellin | MIC-19845 |
| 140 | Flagellin | MIC-19845 |
| 141 | Flagellin | MIC-19845 |
| 142 | Flagellin | MIC-19845 |
| 143 | Flagellin | MIC-19845 |
| 144 | Flagellin | MIC-19845 |
| 145 | Flagellin | MIC-19845 |
| 146 | Flagellin | MIC-84492 |
| 147 | Flagellin | MIC-84492 |
| 148 | Flagellin | MIC-84492 |
| 149 | Flagellin | MIC-84492 |
| 150 | Flagellin | MIC-84492 |
| 151 | Flagellin | MIC-84492 |
| 152 | Flagellin | MIC-84492 |
| 153 | Flagellin | MIC-50391, MIC-69701, MIC-52924 |
| 154 | Flagellin | MIC-50391, MIC-69701, MIC-52924 |
| 155 | Flagellin | MIC-50391, MIC-69701, MIC-52924 |
| 156 | Flagellin | MIC-50391, MIC-69701, MIC-52924 |
| 157 | Flagellin | MIC-85267 |
| 158 | Flagellin | MIC-85267 |
| 159 | Flagellin | MIC-85267 |
| 160 | Flagellin | MIC-85267 |
| 161 | Flagellin | MIC-85267 |
| 162 | Flagellin | MIC-85267 |
| 163 | Flagellin | MIC-85267 |
| 164 | Flagellin | MIC-85267 |
| 165 | Flagellin | MIC-90405, MIC-38993 |
| 166 | Flagellin | MIC-75437 |
| 167 | Flagellin | MIC-75437 |
| 168 | Flagellin | MIC-75437, MIC-20446 |
| 169 | Flagellin | MIC-75437, MIC-20446 |
| 170 | Flagellin | MIC-38993 |
| 171 | Flagellin | MIC-38993 |
| 172 | Flagellin | MIC-38993 |
| 173 | Flagellin | MIC-38993 |
| 174 | Flagellin | MIC-38993 |
| 175 | Flagellin | MIC-20446 |
| 176 | Flagellin | MIC-20446 |
| 177 | Flagellin | MIC-94135 |
| 178 | Flagellin | MIC-94135 |
| 179 | Flagellin | MIC-94135 |
| 180 | Flagellin | MIC-94458 |
| 181 | Flagellin | MIC-94458 |
| 182 | Flagellin | MIC-94458 |
| 183 | Flagellin | MIC-94458, MIC-30352 |
| 184 | Flagellin | MIC-94458, MIC-30352, MIC-82867 |
| 185 | Flagellin | MIC-46385, MIC-62164, MIC-87894 |
| 186 | Flagellin | MIC-46385, MIC-87894 |
| 187 | Flagellin | MIC-46385, MIC-87894 |
| 188 | Flagellin | MIC-46385, MIC-87894 |
| 189 | Flagellin | MIC-62164 |
| 190 | Flagellin | MIC-62164 |
| 191 | Flagellin | MIC-30352 |
| 192 | Flagellin | MIC-82867 |
| 193 | Flagellin | MIC-82867 |
| 194 | Flagellin | MIC-82867 |
| 195 | Flagellin | MIC-82867 |
| 196 | Flagellin | MIC-36254 |
| 197 | Flagellin | MIC-36254 |
| 198 | Flagellin | MIC-36254 |
| 199 | Flagellin | MIC-36254 |
| 200 | Flagellin | MIC-36254 |
| 201 | Flagellin | MIC-36254 |
| 202 | Flagellin | MIC-36254 |
| 203 | Flagellin | MIC-36254 |
| 204 | Flagellin | MIC-36254 |
| 205 | Flagellin | MIC-36254 |
| 206 | Flagellin | MIC-73547 |
| 207 | Flagellin | MIC-73547 |
| 208 | Flagellin | MIC-73547 |
| 209 | Flagellin | MIC-14970, MIC-11290 |
| 210 | Flagellin | MIC-14970, MIC-11290 |
| 211 | Flagellin | MIC-87084 |
| 212 | Flagellin | MIC-87084 |
| 213 | Flagellin | MIC-87084 |
| 214 | Flagellin | MIC-87084 |
| 215 | Flagellin | MIC-87084 |
| 216 | Flagellin | MIC-87084 |
| 217 | Flagellin | MIC-36497 |
| 218 | Flagellin | MIC-36497 |
| 219 | Flagellin | MIC-36497 |
| 220 | Flagellin | MIC-36497 |
| 221 | Flagellin | MIC-36497 |
| 222 | Flagellin | MIC-36497 |
| 223 | Flagellin | MIC-36497 |
| 224 | Flagellin | MIC-36497 |
| 225 | Flagellin | MIC-29285 |
| 226 | Flagellin | MIC-29285 |
| 227 | Flagellin | MIC-29285 |
| 228 | Flagellin | MIC-29285 |
| 229 | Flagellin | MIC-29285 |
| 230 | Flagellin | MIC-29285 |
| 231 | Flagellin | MIC-29285 |
| 232 | Flagellin | MIC-82689 |
| 233 | Flagellin | MIC-82689 |
| 234 | Flagellin | MIC-82689 |
| 235 | Flagellin | MIC-82689 |
| 236 | Flagellin | MIC-82689 |
| 237 | Flagellin | MIC-82689 |
| 238 | Flagellin | MIC-82689 |
| 239 | Flagellin | MIC-82689 |
| 240 | O-Antigen | MIC-70076, MIC-73019, MIC-73547 |
| | biosynthesis | |
| 241 | O-Antigen | MIC-70076, MIC-73019, MIC-73547 |
| | biosynthesis | |
| 242 | O-Antigen | MIC-70076, MIC-73019, MIC-73547 |
| | biosynthesis | |
| 243 | O-Antigen | MIC-70076, MIC-73019, MIC-73547 |
| | biosynthesis | |
| 244 | O-Antigen | MIC-19845 |
| | biosynthesis | |
| 245 | O-Antigen | MIC-85267 |
| | biosynthesis | |
| 246 | O-Antigen | MIC-38993 |
| | biosynthesis | |
| 247 | O-Antigen | MIC-38993 |
| | biosynthesis | |
| 248 | O-Antigen | MIC-38993 |
| | biosynthesis | |
| 249 | O-Antigen | MIC-38993, MIC-82689 |
| | biosynthesis | |
| 250 | O-Antigen | MIC-36497 |
| | biosynthesis | |
| 251 | O-Antigen | MIC-82689 |
| | biosynthesis | |
| 252 | O-Antigen | MIC-82689 |
| | biosynthesis | |
| 253 | O-Antigen | MIC-82689 |
| | biosynthesis | |
| 254 | pseudaminic | MIC-80455, MIC-87588, MIC-86605, |
| | acid biosynthesis | MIC-54642, MIC-24837, MIC-55579, |
| | | MIC-61954, MIC-29662, MIC-90405, |
| | | MIC-14970, MIC-11290 |
| 255 | pseudaminic | MIC-87588, MIC-86605, MIC-54642, |
| | acid biosynthesis | MIC-24837, MIC-55579, MIC-61954, |
| | | MIC-29662, MIC-90405, MIC-14970, |
| | | MIC-11290 |
| 256 | pseudaminic | MIC-70076, MIC-73019, MIC-73547 |
| | acid biosynthesis | |
| 257 | pseudaminic | MIC-70076, MIC-73019, MIC-73547 |
| | acid biosynthesis | |
| 258 | pseudaminic | MIC-70076, MIC-73019, MIC-73547 |
| | acid biosynthesis | |
| 259 | pseudaminic | MIC-70076, MIC-73019, MIC-73547 |
| | acid biosynthesis | |
| 260 | pseudaminic | MIC-70076, MIC-73019, MIC-73547 |
| | acid biosynthesis | |
| 261 | pseudaminic | MIC-70076, MIC-73019, MIC-73547 |
| | acid biosynthesis | |
| 262 | pseudaminic | MIC-70076, MIC-73019, MIC-73547 |
| | acid biosynthesis | |
| 263 | pseudaminic | MIC-79613, MIC-53518 |
| | acid biosynthesis | |
| 264 | pseudaminic | MIC-79613, MIC-53518 |
| | acid biosynthesis | |
| 265 | pseudaminic | MIC-80455 |
| | acid biosynthesis | |
| 266 | pseudaminic | MIC-19845 |
| | acid biosynthesis | |
| 267 | pseudaminic | MIC-19845 |
| | acid biosynthesis | |
| 268 | pseudaminic | MIC-19845 |
| | acid biosynthesis | |
| 269 | pseudaminic | MIC-19845 |
| | acid biosynthesis | |
| 270 | pseudaminic | MIC-50391, MIC-69701, MIC-52924 |
| | acid biosynthesis | |
| 271 | pseudaminic | MIC-85267 |
| | acid biosynthesis | |
| 272 | pseudaminic | MIC-38993 |
| | acid biosynthesis | |
| 273 | pseudaminic | MIC-38993 |
| | acid biosynthesis | |
| 274 | pseudaminic | MIC-38993 |
| | acid biosynthesis | |
| 275 | pseudaminic | MIC-38993 |
| | acid biosynthesis | |
| 276 | pseudaminic | MIC-38993 |
| | acid biosynthesis | |
| 277 | pseudaminic | MIC-38993 |
| | acid biosynthesis | |
| 278 | pseudaminic | MIC-38993 |
| | acid biosynthesis | |
| 279 | pseudaminic | MIC-94458, MIC-30352, MIC-82867 |
| | acid biosynthesis | |
| 280 | pseudaminic | MIC-82689 |
| | acid biosynthesis | |
| 281 | pseudaminic | MIC-82689 |
| | acid biosynthesis | |
| 282 | pseudaminic | MIC-82689 |
| | acid biosynthesis | |
| 283 | pseudaminic | MIC-82689 |
| | acid biosynthesis | |
| 284 | pseudaminic | MIC-82689 |
| | acid biosynthesis | |
| 285 | pseudaminic | MIC-82689 |
| | acid biosynthesis | |
| 286 | pseudaminic | MIC-82689 |
| | acid biosynthesis | |
| 287 | Tailocin | MIC-87588, MIC-86605, MIC-54642, |
| | gene cluster | MIC-61954, MIC-29662 |
| 288 | Tailocin | MIC-70076, MIC-73019, MIC-24837, |
| | gene cluster | MIC-55579, MIC-73547 |
| 289 | Tailocin | MIC-70076, MIC-73019, MIC-24837, |
| | gene cluster | MIC-55579, MIC-73547 |
| 290 | Tailocin | MIC-70076, MIC-73019, MIC-73547 |
| | gene cluster | |
| 291 | Tailocin | MIC-70076, MIC-73019, MIC-73547 |
| | gene cluster | |
| 292 | Tailocin | MIC-70076, MIC-73019, MIC-38993, |
| | gene cluster | MIC-73547 |
| 293 | Tailocin | MIC-70076, MIC-73019, MIC-38993, |
| | gene cluster | MIC-73547 |
| 294 | Tailocin | MIC-70076, MIC-73019, MIC-73547 |
| | gene cluster | |
| 295 | Tailocin | MIC-70076, MIC-73019, MIC-73547 |
| | gene cluster | |
| 296 | Tailocin | MIC-70076, MIC-73019, MIC-73547 |
| | gene cluster | |
| 297 | Tailocin | MIC-70076, MIC-73019, MIC-73547 |
| | gene cluster | |
| 298 | Tailocin | MIC-70076, MIC-73019, MIC-73547 |
| | gene cluster | |
| 299 | Tailocin | MIC-70076, MIC-73019, MIC-73547 |
| | gene cluster | |
| 300 | Tailocin | MIC-70076, MIC-73019, MIC-73547 |
| | gene cluster | |
| 301 | Tailocin | MIC-70076, MIC-73019, MIC-73547 |
| | gene cluster | |
| 302 | Tailocin | MIC-70076, MIC-73019, MIC-73547 |
| | gene cluster | |
| 303 | Tailocin | MIC-70076, MIC-73019, MIC-73547 |
| | gene cluster | |
| 304 | Tailocin | MIC-70076, MIC-73019, MIC-73547 |
| | gene cluster | |
| 305 | Tailocin | MIC-70076, MIC-73019, MIC-73547 |
| | gene cluster | |
| 306 | Tailocin | MIC-70076, MIC-73019, MIC-73547 |
| | gene cluster | |
| 307 | Tailocin | MIC-70076, MIC-73019, MIC-73547 |
| | gene cluster | |
| 308 | Tailocin | MIC-70076, MIC-73019, MIC-73547 |
| | gene cluster | |
| 309 | Tailocin | MIC-70076, MIC-73019, MIC-73547 |
| | gene cluster | |
| 310 | Tailocin | MIC-70076, MIC-73019, MIC-73547 |
| | gene cluster | |
| 311 | Tailocin | MIC-70076, MIC-73019, MIC-38993, |
| | gene cluster | MIC-73547 |
| 312 | Tailocin | MIC-70076, MIC-73019, MIC-73547 |
| | gene cluster | |
| 313 | Tailocin | MIC-70076, MIC-73019, MIC-73547 |
| | gene cluster | |
| 314 | Tailocin | MIC-70076, MIC-73019, MIC-73547 |
| | gene cluster | |
| 315 | Tailocin | MIC-70076, MIC-73019, MIC-73547 |
| | gene cluster | |
| 316 | Tailocin | MIC-70076, MIC-73019, MIC-73547 |
| | gene cluster | |
| 317 | Tailocin | MIC-70076, MIC-73019, MIC-73547 |
| | gene cluster | |
| 318 | Tailocin | MIC-70076, MIC-73019, MIC-73547 |
| | gene cluster | |
| 319 | Tailocin | MIC-70076, MIC-73019, MIC-73547 |
| | gene cluster | |
| 320 | Tailocin | MIC-70076, MIC-73019, MIC-73547 |
| | gene cluster | |
| 321 | Tailocin | MIC-70076, MIC-73019, MIC-73547 |
| | gene cluster | |
| 322 | Tailocin | MIC-70076, MIC-73019, MIC-73547 |
| | gene cluster | |
| 323 | Tailocin | MIC-70076, MIC-73019, MIC-73547 |
| | gene cluster | |
| 324 | Tailocin | MIC-70076, MIC-73019, MIC-73547 |
| | gene cluster | |
| 325 | Tailocin | MIC-70076, MIC-73019, MIC-73547 |
| | gene cluster | |
| 326 | Tailocin | MIC-70076, MIC-73019, MIC-73547 |
| | gene cluster | |
| 327 | Tailocin | MIC-70076, MIC-73019, MIC-73547 |
| | gene cluster | |
| 328 | Tailocin | MIC-70076, MIC-73019, MIC-73547 |
| | gene cluster | |
| 329 | Tailocin | MIC-70076, MIC-73019, MIC-73547 |
| | gene cluster | |
| 330 | Tailocin | MIC-70076, MIC-73019, MIC-73547 |
| | gene cluster | |
| 331 | Tailocin | MIC-70076, MIC-73019, MIC-73547 |
| | gene cluster | |
| 332 | Tailocin | MIC-70076, MIC-73019, MIC-73547 |
| | gene cluster | |
| 333 | Tailocin | MIC-70076, MIC-73019, MIC-73547 |
| | gene cluster | |
| 334 | Tailocin | MIC-70076, MIC-73019, MIC-73547 |
| | gene cluster | |
| 335 | Tailocin | MIC-70076, MIC-73019, MIC-73547 |
| | gene cluster | |
| 336 | Tailocin | MIC-70076, MIC-73019, MIC-73547 |
| | gene cluster | |
| 337 | Tailocin | MIC-70076, MIC-73019, MIC-73547 |
| | gene cluster | |
| 338 | Tailocin | MIC-70076, MIC-73019, MIC-73547 |
| | gene cluster | |
| 339 | Tailocin | MIC-70076, MIC-73019, MIC-73547 |
| | gene cluster | |
| 340 | Tailocin | MIC-70076, MIC-73019, MIC-73547 |
| | gene cluster | |
| 341 | Tailocin | MIC-70076, MIC-73019, MIC-73547 |
| | gene cluster | |
| 342 | Tailocin | MIC-70076, MIC-73019, MIC-73547 |
| | gene cluster | |
| 343 | Tailocin | MIC-82330, MIC-61954, MIC-29662, |
| | gene cluster | MIC-36254 |
| 344 | Tailocin | MIC-68901, MIC-19814 |
| | gene cluster | |
| 345 | Tailocin | MIC-68901, MIC-19814 |
| | gene cluster | |
| 346 | Tailocin | MIC-68901, MIC-19814 |
| | gene cluster | |
| 347 | Tailocin | MIC-68901, MIC-19814 |
| | gene cluster | |
| 348 | Tailocin | MIC-68901, MIC-19814 |
| | gene cluster | |
| 349 | Tailocin | MIC-68901, MIC-19814 |
| | gene cluster | |
| 350 | Tailocin | MIC-68901, MIC-19814 |
| | gene cluster | |
| 351 | Tailocin | MIC-68901, MIC-19814 |
| | gene cluster | |
| 352 | Tailocin | MIC-68901, MIC-19814 |
| | gene cluster | |
| 353 | Tailocin | MIC-68901, MIC-19814 |
| | gene cluster | |
| 354 | Tailocin | MIC-68901, MIC-19814 |
| | gene cluster | |
| 355 | Tailocin | MIC-68901, MIC-19814 |
| | gene cluster | |
| 356 | Tailocin | MIC-68901, MIC-19814 |
| | gene cluster | |
| 357 | Tailocin | MIC-68901, MIC-19814 |
| | gene cluster | |
| 358 | Tailocin | MIC-68901, MIC-19814 |
| | gene cluster | |
| 359 | Tailocin | MIC-68901, MIC-19814 |
| | gene cluster | |
| 360 | Tailocin | MIC-68901, MIC-19814 |
| | gene cluster | |
| 361 | Tailocin | MIC-68901, MIC-19814 |
| | gene cluster | |
| 362 | Tailocin | MIC-68901, MIC-19814 |
| | gene cluster | |
| 363 | Tailocin | MIC-68901, MIC-19814 |
| | gene cluster | |
| 364 | Tailocin | MIC-68901, MIC-19814 |
| | gene cluster | |
| 365 | Tailocin | MIC-68901 |
| | gene cluster | |
| 366 | Tailocin | MIC-68901 |
| | gene cluster | |
| 367 | Tailocin | MIC-68901 |
| | gene cluster | |
| 368 | Tailocin | MIC-68901 |
| | gene cluster | |
| 369 | Tailocin | MIC-68901 |
| | gene cluster | |
| 370 | Tailocin | MIC-68901 |
| | gene cluster | |
| 371 | Tailocin | MIC-52924 |
| | gene cluster | |
| 372 | Tailocin | MIC-52924 |
| | gene cluster | |
| 373 | Tailocin | MIC-52924 |
| | gene cluster | |
| 374 | Tailocin | MIC-52924 |
| | gene cluster | |
| 375 | Tailocin | MIC-83010, MIC-86605, MIC-81265, |
| | gene cluster | MIC-88834, MIC-84492, MIC-75437, |
| | | MIC-20446, MIC-94135, MIC-46385, |
| | | MIC-62164, MIC-87084, MIC-36497, |
| | | MIC-82689 |
| 376 | Tailocin | MIC-81265, MIC-88834 |
| | gene cluster | |
| 377 | Tailocin | MIC-81265, MIC-88834, MIC-84492 |
| | gene cluster | |
| 378 | Tailocin | MIC-81265, MIC-88834, MIC-84492 |
| | gene cluster | |
| 379 | Tailocin | MIC-81265, MIC-88834, MIC-84492, |
| | gene cluster | MIC-75437, MIC-20446 |
| 380 | Tailocin | MIC-81265, MIC-88834, MIC-84492, |
| | gene cluster | MIC-75437, MIC-20446 |
| 381 | Tailocin | MIC-81265, MIC-88834, MIC-84492, |
| | gene cluster | MIC-75437, MIC-20446 |
| 382 | Tailocin | MIC-61954, MIC-29662 |
| | gene cluster | |
| 383 | Tailocin | MIC-61954, MIC-29662 |
| | gene cluster | |
| 384 | Tailocin | MIC-61954, MIC-29662 |
| | gene cluster | |
| 385 | Tailocin | MIC-61954, MIC-29662 |
| | gene cluster | |
| 386 | Tailocin | MIC-61954, MIC-29662 |
| | gene cluster | |
| 387 | Tailocin | MIC-61954, MIC-29662 |
| | gene cluster | |
| 388 | Tailocin | MIC-61954, MIC-29662 |
| | gene cluster | |
| 389 | Tailocin | MIC-61954, MIC-29662 |
| | gene cluster | |
| 390 | Tailocin | MIC-61954, MIC-29662 |
| | gene cluster | |
| 391 | Tailocin | MIC-82330 |
| | gene cluster | |
| 392 | Tailocin | MIC-68773 |
| | gene cluster | |
| 393 | Tailocin | MIC-68773 |
| | gene cluster | |
| 394 | Tailocin | MIC-68773 |
| | gene cluster | |
| 395 | Tailocin | MIC-68773 |
| | gene cluster | |
| 396 | Tailocin | MIC-68773 |
| | gene cluster | |
| 397 | Tailocin | MIC-68773 |
| | gene cluster | |
| 398 | Tailocin | MIC-68773 |
| | gene cluster | |
| 399 | Tailocin | MIC-68773 |
| | gene cluster | |
| 400 | Tailocin | MIC-54778 |
| | gene cluster | |
| 401 | Tailocin | MIC-19814 |
| | gene cluster | |
| 402 | Tailocin | MIC-19814 |
| | gene cluster | |
| 403 | Tailocin | MIC-19814 |
| | gene cluster | |
| 404 | Tailocin | MIC-19814 |
| | gene cluster | |
| 405 | Tailocin | MIC-19814 |
| | gene cluster | |
| 406 | Tailocin | MIC-19814 |
| | gene cluster | |
| 407 | Tailocin | MIC-19814 |
| | gene cluster | |
| 408 | Tailocin | MIC-19814 |
| | gene cluster | |
| 409 | Tailocin | MIC-87198 |
| | gene cluster | |
| 410 | Tailocin | MIC-87198 |
| | gene cluster | |
| 411 | Tailocin | MIC-87198 |
| | gene cluster | |
| 412 | Tailocin | MIC-87198 |
| | gene cluster | |
| 413 | Tailocin | MIC-87198 |
| | gene cluster | |
| 414 | Tailocin | MIC-87198 |
| | gene cluster | |
| 415 | Tailocin | MIC-87198 |
| | gene cluster | |
| 416 | Tailocin | MIC-90405 |
| | gene cluster | |
| 417 | Tailocin | MIC-90405 |
| | gene cluster | |
| 418 | Tailocin | MIC-90405 |
| | gene cluster | |
| 419 | Tailocin | MIC-90405 |
| | gene cluster | |
| 420 | Tailocin | MIC-90405 |
| | gene cluster | |
| 421 | Tailocin | MIC-90405 |
| | gene cluster | |
| 422 | Tailocin | MIC-90405 |
| | gene cluster | |
| 423 | Tailocin | MIC-90405 |
| | gene cluster | |
| 424 | Tailocin | MIC-90405 |
| | gene cluster | |
| 425 | Tailocin | MIC-90405 |
| | gene cluster | |
| 426 | Tailocin | MIC-90405 |
| | gene cluster | |
| 427 | Tailocin | MIC-90405 |
| | gene cluster | |
| 428 | Tailocin | MIC-90405 |
| | gene cluster | |
| 429 | Tailocin | MIC-90405 |
| | gene cluster | |
| 430 | Tailocin | MIC-87894 |
| | gene cluster | |
| 431 | Tailocin | MIC-87894 |
| | gene cluster | |
| 432 | Tailocin | MIC-87894 |
| | gene cluster | |
| 433 | Tailocin | MIC-87894 |
| | gene cluster | |
| 434 | Tailocin | MIC-87894 |
| | gene cluster | |
| 435 | Tailocin | MIC-87894 |
| | gene cluster | |
| 436 | Tailocin | MIC-87894 |
| | gene cluster | |
| 437 | Tailocin | MIC-87894 |
| | gene cluster | |
| 438 | Tailocin | MIC-87894 |
| | gene cluster | |
| 439 | Tailocin | MIC-87894 |
| | gene cluster | |
| 440 | Tailocin | MIC-87894 |
| | gene cluster | |
| 441 | Tailocin | MIC-87894 |
| | gene cluster | |
| 442 | Tailocin | MIC-14439 |
| | gene cluster | |
| 443 | Tailocin | MIC-14439 |
| | gene cluster | |
| 444 | Tailocin | MIC-14439 |
| | gene cluster | |
| 445 | Tailocin | MIC-14439 |
| | gene cluster | |
| 446 | Tailocin | MIC-14439 |
| | gene cluster | |
| 447 | Tailocin | MIC-14439 |
| | gene cluster | |
| 448 | Tailocin | MIC-14439 |
| | gene cluster | |
| 449 | Tailocin | MIC-14439 |
| | gene cluster | |
| 450 | Tailocin | MIC-14439 |
| | gene cluster | |
| 451 | Tailocin | MIC-14439 |
| | gene cluster | |
| 452 | Tailocin | MIC-14439 |
| | gene cluster | |
| 453 | Tailocin | MIC-87588, MIC-86605, MIC-54642 |
| | gene cluster | |
| 454 | Tailocin | MIC-87588, MIC-86605, MIC-54642 |
| | gene cluster | |
| 455 | Tailocin | MIC-87588, MIC-86605, MIC-54642 |
| | gene cluster | |
| 456 | Tailocin | MIC-87588, MIC-86605, MIC-54642, |
| | gene cluster | MIC-84492 |
| 457 | Tailocin | MIC-87588, MIC-86605, MIC-54642, |
| | gene cluster | MIC-84492 |
| 458 | Tailocin | MIC-87588, MIC-86605, MIC-54642, |
| | gene cluster | MIC-84492 |
| 459 | Tailocin | MIC-87588, MIC-54642 |
| | gene cluster | |
| 460 | Tailocin | MIC-79613, MIC-53518 |
| | gene cluster | |
| 461 | Tailocin | MIC-79613, MIC-53518 |
| | gene cluster | |
| 462 | Tailocin | MIC-79613, MIC-53518 |
| | gene cluster | |
| 463 | Tailocin | MIC-79613, MIC-53518 |
| | gene cluster | |
| 464 | Tailocin | MIC-79613, MIC-53518 |
| | gene cluster | |
| 465 | Tailocin | MIC-79613, MIC-53518 |
| | gene cluster | |
| 466 | Tailocin | MIC-79613, MIC-53518 |
| | gene cluster | |
| 467 | Tailocin | MIC-79613, MIC-53518 |
| | gene cluster | |
| 468 | Tailocin | MIC-79613, MIC-53518 |
| | gene cluster | |
| 469 | Tailocin | MIC-79613, MIC-53518 |
| | gene cluster | |
| 470 | Tailocin | MIC-79613, MIC-53518 |
| | gene cluster | |
| 471 | Tailocin | MIC-79613, MIC-53518 |
| | gene cluster | |
| 472 | Tailocin | MIC-79613, MIC-53518 |
| | gene cluster | |
| 473 | Tailocin | MIC-79613, MIC-53518 |
| | gene cluster | |
| 474 | Tailocin | MIC-79613, MIC-53518 |
| | gene cluster | |
| 475 | Tailocin | MIC-79613, MIC-53518 |
| | gene cluster | |
| 476 | Tailocin | MIC-79613, MIC-53518 |
| | gene cluster | |
| 477 | Tailocin | MIC-79613, MIC-53518 |
| | gene cluster | |
| 478 | Tailocin | MIC-79613, MIC-53518 |
| | gene cluster | |
| 479 | Tailocin | MIC-79613, MIC-53518 |
| | gene cluster | |
| 480 | Tailocin | MIC-79613, MIC-53518 |
| | gene cluster | |
| 481 | Tailocin | MIC-79613, MIC-53518 |
| | gene cluster | |
| 482 | Tailocin | MIC-79613, MIC-53518 |
| | gene cluster | |
| 483 | Tailocin | MIC-79613, MIC-53518 |
| | gene cluster | |
| 484 | Tailocin | MIC-79613, MIC-53518 |
| | gene cluster | |
| 485 | Tailocin | MIC-53518 |
| | gene cluster | |
| 486 | Tailocin | MIC-53518 |
| | gene cluster | |
| 487 | Tailocin | MIC-53518 |
| | gene cluster | |
| 488 | Tailocin | MIC-53518 |
| | gene cluster | |
| 489 | Tailocin | MIC-53518 |
| | gene cluster | |
| 490 | Tailocin | MIC-53518 |
| | gene cluster | |
| 491 | Tailocin | MIC-53518 |
| | gene cluster | |
| 492 | Tailocin | MIC-83010, MIC-94135, MIC-46385, |
| | gene cluster | MIC-62164, MIC-87084, MIC-36497, |
| | | MIC-82689 |
| 493 | Tailocin | MIC-83010, MIC-46385, MIC-62164 |
| | gene cluster | |
| 494 | Tailocin | MIC-83010, MIC-46385, MIC-62164, |
| | gene cluster | MIC-87084 |
| 495 | Tailocin | MIC-83010, MIC-46385, MIC-62164, |
| | gene cluster | MIC-87084 |
| 496 | Tailocin | MIC-83010, MIC-46385, MIC-62164, |
| | gene cluster | MIC-87084 |
| 497 | Tailocin | MIC-83740 |
| | gene cluster | |
| 498 | Tailocin | MIC-83740 |
| | gene cluster | |
| 499 | Tailocin | MIC-83740 |
| | gene cluster | |
| 500 | Tailocin | MIC-83740 |
| | gene cluster | |
| 501 | Tailocin | MIC-83740 |
| | gene cluster | |
| 502 | Tailocin | MIC-83740 |
| | gene cluster | |
| 503 | Tailocin | MIC-83740 |
| | gene cluster | |
| 504 | Tailocin | MIC-83740 |
| | gene cluster | |
| 505 | Tailocin | MIC-83740 |
| | gene cluster | |
| 506 | Tailocin | MIC-83740 |
| | gene cluster | |
| 507 | Tailocin | MIC-83740 |
| | gene cluster | |
| 508 | Tailocin | MIC-83740 |
| | gene cluster | |
| 509 | Tailocin | MIC-80455 |
| | gene cluster | |
| 510 | Tailocin | MIC-80455 |
| | gene cluster | |
| 511 | Tailocin | MIC-80455 |
| | gene cluster | |
| 512 | Tailocin | MIC-80455 |
| | gene cluster | |
| 513 | Tailocin | MIC-80455 |
| | gene cluster | |
| 514 | Tailocin | MIC-80455 |
| | gene cluster | |
| 515 | Tailocin | MIC-80455 |
| | gene cluster | |
| 516 | Tailocin | MIC-80455 |
| | gene cluster | |
| 517 | Tailocin | MIC-80455 |
| | gene cluster | |
| 518 | Tailocin | MIC-80455 |
| | gene cluster | |
| 519 | Tailocin | MIC-87588, MIC-86605, MIC-54642 |
| | gene cluster | |
| 520 | Tailocin | MIC-87588, MIC-86605, MIC-54642 |
| | gene cluster | |
| 521 | Tailocin | MIC-87588, MIC-86605, MIC-54642 |
| | gene cluster | |
| 522 | Tailocin | MIC-87588, MIC-86605, MIC-54642 |
| | gene cluster | |
| 523 | Tailocin | MIC-87588, MIC-86605, MIC-54642 |
| | gene cluster | |
| 524 | Tailocin | MIC-87588, MIC-86605, MIC-54642 |
| | gene cluster | |
| 525 | Tailocin | MIC-87588, MIC-86605, MIC-54642 |
| | gene cluster | |
| 526 | Tailocin | MIC-87588, MIC-86605, MIC-54642 |
| | gene cluster | |
| 527 | Tailocin | MIC-87588, MIC-86605, MIC-54642 |
| | gene cluster | |
| 528 | Tailocin | MIC-87588, MIC-86605, MIC-54642 |
| | gene cluster | |
| 529 | Tailocin | MIC-87588, MIC-86605, MIC-54642 |
| | gene cluster | |
| 530 | Tailocin | MIC-87588, MIC-86605, MIC-54642 |
| | gene cluster | |
| 531 | Tailocin | MIC-87588, MIC-86605, MIC-54642 |
| | gene cluster | |
| 532 | Tailocin | MIC-87588, MIC-86605, MIC-54642 |
| | gene cluster | |
| 533 | Tailocin | MIC-87588, MIC-86605, MIC-54642 |
| | gene cluster | |
| 534 | Tailocin | MIC-87588, MIC-86605, MIC-54642 |
| | gene cluster | |
| 535 | Tailocin | MIC-87588, MIC-86605, MIC-54642 |
| | gene cluster | |
| 536 | Tailocin | MIC-87588, MIC-86605, MIC-54642 |
| | gene cluster | |
| 537 | Tailocin | MIC-87588, MIC-86605, MIC-54642 |
| | gene cluster | |
| 538 | Tailocin | MIC-87588, MIC-86605, MIC-54642 |
| | gene cluster | |
| 539 | Tailocin | MIC-87588, MIC-86605, MIC-54642 |
| | gene cluster | |
| 540 | Tailocin | MIC-87588, MIC-86605, MIC-54642 |
| | gene cluster | |
| 541 | Tailocin | MIC-87588, MIC-86605, MIC-54642 |
| | gene cluster | |
| 542 | Tailocin | MIC-87588, MIC-86605, MIC-54642 |
| | gene cluster | |
| 543 | Tailocin | MIC-87588, MIC-86605, MIC-54642 |
| | gene cluster | |
| 544 | Tailocin | MIC-87588, MIC-86605, MIC-54642 |
| | gene cluster | |
| 545 | Tailocin | MIC-87588, MIC-86605, MIC-54642 |
| | gene cluster | |
| 546 | Tailocin | MIC-87588, MIC-86605, MIC-54642 |
| | gene cluster | |
| 547 | Tailocin | MIC-87588, MIC-86605, MIC-54642 |
| | gene cluster | |
| 548 | Tailocin | MIC-87588, MIC-86605, MIC-54642 |
| | gene cluster | |
| 549 | Tailocin | MIC-87588, MIC-86605, MIC-54642, |
| | gene cluster | MIC-84492 |
| 550 | Tailocin | MIC-87588, MIC-86605, MIC-54642, |
| | gene cluster | MIC-84492 |
| 551 | Tailocin | MIC-87588, MIC-86605, MIC-54642, |
| | gene cluster | MIC-84492 |
| 552 | Tailocin | MIC-87588, MIC-86605, MIC-54642, |
| | gene cluster | MIC-84492 |
| 553 | Tailocin | MIC-87588, MIC-86605, MIC-54642, |
| | gene cluster | MIC-84492 |
| 554 | Tailocin | MIC-87588, MIC-86605, MIC-54642, |
| | gene cluster | MIC-84492 |
| 555 | Tailocin | MIC-87588, MIC-54642 |
| | gene cluster | |
| 556 | Tailocin | MIC-86605 |
| | gene cluster | |
| 557 | Tailocin | MIC-86605 |
| | gene cluster | |
| 558 | Tailocin | MIC-86605, MIC-75437, MIC-14439, |
| | gene cluster | MIC-20446, MIC-94135, MIC-87084, |
| | | MIC-36497, MIC-82689 |
| 559 | Tailocin | MIC-86605, MIC-75437, MIC-20446, |
| | gene cluster | MIC-94135, MIC-36497, MIC-82689 |
| 560 | Tailocin | MIC-86605, MIC-94135, MIC-36497 |
| | gene cluster | |
| 561 | Tailocin | MIC-86605, MIC-94135, MIC-36497, |
| | gene cluster | MIC-82689 |
| 562 | Tailocin | MIC-86605, MIC-94135, MIC-36497, |
| | gene cluster | MIC-82689 |
| 563 | Tailocin | MIC-94504 |
| | gene cluster | |
| 564 | Tailocin | MIC-94504 |
| | gene cluster | |
| 565 | Tailocin | MIC-94504 |
| | gene cluster | |
| 566 | Tailocin | MIC-24837, MIC-55579 |
| | gene cluster | |
| 567 | Tailocin | MIC-24837, MIC-55579 |
| | gene cluster | |
| 568 | Tailocin | MIC-24837, MIC-55579 |
| | gene cluster | |
| 569 | Tailocin | MIC-24837, MIC-55579 |
| | gene cluster | |
| 570 | Tailocin | MIC-24837, MIC-55579 |
| | gene cluster | |
| 571 | Tailocin | MIC-24837, MIC-55579 |
| | gene cluster | |
| 572 | Tailocin | MIC-24837, MIC-55579 |
| | gene cluster | |
| 573 | Tailocin | MIC-24837, MIC-55579 |
| | gene cluster | |
| 574 | Tailocin | MIC-24837, MIC-55579 |
| | gene cluster | |
| 575 | Tailocin | MIC-24837, MIC-55579 |
| | gene cluster | |
| 576 | Tailocin | MIC-24837, MIC-55579 |
| | gene cluster | |
| 577 | Tailocin | MIC-24837, MIC-55579 |
| | gene cluster | |
| 578 | Tailocin | MIC-24837, MIC-55579 |
| | gene cluster | |
| 579 | Tailocin | MIC-24837, MIC-55579 |
| | gene cluster | |
| 580 | Tailocin | MIC-24837, MIC-55579 |
| | gene cluster | |
| 581 | Tailocin | MIC-24837, MIC-55579 |
| | gene cluster | |
| 582 | Tailocin | MIC-24837, MIC-55579 |
| | gene cluster | |
| 583 | Tailocin | MIC-24837, MIC-55579 |
| | gene cluster | |
| 584 | Tailocin | MIC-24837, MIC-55579 |
| | gene cluster | |
| 585 | Tailocin | MIC-24837, MIC-55579 |
| | gene cluster | |
| 586 | Tailocin | MIC-24837, MIC-55579 |
| | gene cluster | |
| 587 | Tailocin | MIC-24837, MIC-55579 |
| | gene cluster | |
| 588 | Tailocin | MIC-24837, MIC-55579 |
| | gene cluster | |
| 589 | Tailocin | MIC-24837, MIC-55579 |
| | gene cluster | |
| 590 | Tailocin | MIC-24837, MIC-55579 |
| | gene cluster | |
| 591 | Tailocin | MIC-24837, MIC-55579 |
| | gene cluster | |
| 592 | Tailocin | MIC-24837, MIC-55579 |
| | gene cluster | |
| 593 | Tailocin | MIC-24837, MIC-55579 |
| | gene cluster | |
| 594 | Tailocin | MIC-24837, MIC-55579 |
| | gene cluster | |
| 595 | Tailocin | MIC-24837, MIC-55579 |
| | gene cluster | |
| 596 | Tailocin | MIC-24837, MIC-55579 |
| | gene cluster | |
| 597 | Tailocin | MIC-24837, MIC-55579 |
| | gene cluster | |
| 598 | Tailocin | MIC-24837, MIC-55579 |
| | gene cluster | |
| 599 | Tailocin | MIC-24837, MIC-55579 |
| | gene cluster | |
| 600 | Tailocin | MIC-24837, MIC-55579 |
| | gene cluster | |
| 601 | Tailocin | MIC-24837, MIC-55579 |
| | gene cluster | |
| 602 | Tailocin | MIC-24837, MIC-55579 |
| | gene cluster | |
| 603 | Tailocin | MIC-24837, MIC-55579, MIC-85267 |
| | gene cluster | |
| 604 | Tailocin | MIC-24837, MIC-55579, MIC-85267 |
| | gene cluster | |
| 605 | Tailocin | MIC-24837, MIC-55579, MIC-29285 |
| | gene cluster | |
| 606 | Tailocin | MIC-55579 |
| | gene cluster | |
| 607 | Tailocin | MIC-87198, MIC-94458, MIC-30352, |
| | gene cluster | MIC-82867 |
| 608 | Tailocin | MIC-19845 |
| | gene cluster | |
| 609 | Tailocin | MIC-19845 |
| | gene cluster | |
| 610 | Tailocin | MIC-19845 |
| | gene cluster | |
| 611 | Tailocin | MIC-19845 |
| | gene cluster | |
| 612 | Tailocin | MIC-19845 |
| | gene cluster | |
| 613 | Tailocin | MIC-19845 |
| | gene cluster | |
| 614 | Tailocin | MIC-19845 |
| | gene cluster | |
| 615 | Tailocin | MIC-19845 |
| | gene cluster | |
| 616 | Tailocin | MIC-19845 |
| | gene cluster | |
| 617 | Tailocin | MIC-19845 |
| | gene cluster | |
| 618 | Tailocin | MIC-19845 |
| | gene cluster | |
| 619 | Tailocin | MIC-84492 |
| | gene cluster | |
| 620 | Tailocin | MIC-84492 |
| | gene cluster | |
| 621 | Tailocin | MIC-84492 |
| | gene cluster | |
| 622 | Tailocin | MIC-84492 |
| | gene cluster | |
| 623 | Tailocin | MIC-84492 |
| | gene cluster | |
| 624 | Tailocin | MIC-84492 |
| | gene cluster | |
| 625 | Tailocin | MIC-84492 |
| | gene cluster | |
| 626 | Tailocin | MIC-84492 |
| | gene cluster | |
| 627 | Tailocin | MIC-84492 |
| | gene cluster | |
| 628 | Tailocin | MIC-84492 |
| | gene cluster | |
| 629 | Tailocin | MIC-84492 |
| | gene cluster | |
| 630 | Tailocin | MIC-84492 |
| | gene cluster | |
| 631 | Tailocin | MIC-84492 |
| | gene cluster | |
| 632 | Tailocin | MIC-84492 |
| | gene cluster | |
| 633 | Tailocin | MIC-84492 |
| | gene cluster | |
| 634 | Tailocin | MIC-84492 |
| | gene cluster | |
| 635 | Tailocin | MIC-84492 |
| | gene cluster | |
| 636 | Tailocin | MIC-84492 |
| | gene cluster | |
| 637 | Tailocin | MIC-84492 |
| | gene cluster | |
| 638 | Tailocin | MIC-84492 |
| | gene cluster | |
| 639 | Tailocin | MIC-84492 |
| | gene cluster | |
| 640 | Tailocin | MIC-84492 |
| | gene cluster | |
| 641 | Tailocin | MIC-84492 |
| | gene cluster | |
| 642 | Tailocin | MIC-84492, MIC-85267 |
| | gene cluster | |
| 643 | Tailocin | MIC-50391, MIC-69701 |
| | gene cluster | |
| 644 | Tailocin | MIC-50391, MIC-69701 |
| | gene cluster | |
| 645 | Tailocin | MIC-50391, MIC-69701 |
| | gene cluster | |
| 646 | Tailocin | MIC-50391, MIC-69701 |
| | gene cluster | |
| 647 | Tailocin | MIC-50391, MIC-69701 |
| | gene cluster | |
| 648 | Tailocin | MIC-50391, MIC-69701 |
| | gene cluster | |
| 649 | Tailocin | MIC-50391, MIC-69701 |
| | gene cluster | |
| 650 | Tailocin | MIC-50391, MIC-69701 |
| | gene cluster | |
| 651 | Tailocin | MIC-50391, MIC-69701 |
| | gene cluster | |
| 652 | Tailocin | MIC-50391, MIC-69701 |
| | gene cluster | |
| 653 | Tailocin | MIC-50391, MIC-69701 |
| | gene cluster | |
| 654 | Tailocin | MIC-50391, MIC-69701 |
| | gene cluster | |
| 655 | Tailocin | MIC-85267 |
| | gene cluster | |
| 656 | Tailocin | MIC-85267 |
| | gene cluster | |
| 657 | Tailocin | MIC-85267 |
| | gene cluster | |
| 658 | Tailocin | MIC-85267 |
| | gene cluster | |
| 659 | Tailocin | MIC-85267 |
| | gene cluster | |
| 660 | Tailocin | MIC-85267 |
| | gene cluster | |
| 661 | Tailocin | MIC-85267 |
| | gene cluster | |
| 662 | Tailocin | MIC-85267 |
| | gene cluster | |
| 663 | Tailocin | MIC-85267 |
| | gene cluster | |
| 664 | Tailocin | MIC-85267 |
| | gene cluster | |
| 665 | Tailocin | MIC-85267 |
| | gene cluster | |
| 666 | Tailocin | MIC-85267 |
| | gene cluster | |
| 667 | Tailocin | MIC-85267 |
| | gene cluster | |
| 668 | Tailocin | MIC-85267 |
| | gene cluster | |
| 669 | Tailocin | MIC-85267 |
| | gene cluster | |
| 670 | Tailocin | MIC-85267 |
| | gene cluster | |
| 671 | Tailocin | MIC-85267 |
| | gene cluster | |
| 672 | Tailocin | MIC-85267 |
| | gene cluster | |
| 673 | Tailocin | MIC-85267 |
| | gene cluster | |
| 674 | Tailocin | MIC-85267 |
| | gene cluster | |
| 675 | Tailocin | MIC-85267 |
| | gene cluster | |
| 676 | Tailocin | MIC-85267 |
| | gene cluster | |
| 677 | Tailocin | MIC-85267 |
| | gene cluster | |
| 678 | Tailocin | MIC-85267 |
| | gene cluster | |
| 679 | Tailocin | MIC-85267 |
| | gene cluster | |
| 680 | Tailocin | MIC-85267 |
| | gene cluster | |
| 681 | Tailocin | MIC-85267 |
| | gene cluster | |
| 682 | Tailocin | MIC-85267 |
| | gene cluster | |
| 683 | Tailocin | MIC-85267 |
| | gene cluster | |
| 684 | Tailocin | MIC-85267 |
| | gene cluster | |
| 685 | Tailocin | MIC-85267 |
| | gene cluster | |
| 686 | Tailocin | MIC-85267 |
| | gene cluster | |
| 687 | Tailocin | MIC-85267 |
| | gene cluster | |
| 688 | Tailocin | MIC-85267 |
| | gene cluster | |
| 689 | Tailocin | MIC-85267 |
| | gene cluster | |
| 690 | Tailocin | MIC-85267 |
| | gene cluster | |
| 691 | Tailocin | MIC-85267 |
| | gene cluster | |
| 692 | Tailocin | MIC-85267 |
| | gene cluster | |
| 693 | Tailocin | MIC-85267 |
| | gene cluster | |
| 694 | Tailocin | MIC-85267 |
| | gene cluster | |
| 695 | Tailocin | MIC-85267 |
| | gene cluster | |
| 696 | Tailocin | MIC-85267 |
| | gene cluster | |
| 697 | Tailocin | MIC-75437, MIC-20446 |
| | gene cluster | |
| 698 | Tailocin | MIC-75437, MIC-20446 |
| | gene cluster | |
| 699 | Tailocin | MIC-75437, MIC-20446 |
| | gene cluster | |
| 700 | Tailocin | MIC-75437, MIC-20446 |
| | gene cluster | |
| 701 | Tailocin | MIC-75437, MIC-20446 |
| | gene cluster | |
| 702 | Tailocin | MIC-75437, MIC-20446 |
| | gene cluster | |
| 703 | Tailocin | MIC-75437, MIC-20446 |
| | gene cluster | |
| 704 | Tailocin | MIC-75437, MIC-20446 |
| | gene cluster | |
| 705 | Tailocin | MIC-75437, MIC-20446 |
| | gene cluster | |
| 706 | Tailocin | MIC-75437, MIC-20446 |
| | gene cluster | |
| 707 | Tailocin | MIC-75437, MIC-20446 |
| | gene cluster | |
| 708 | Tailocin | MIC-75437, MIC-20446 |
| | gene cluster | |
| 709 | Tailocin | MIC-75437, MIC-20446 |
| | gene cluster | |
| 710 | Tailocin | MIC-75437, MIC-20446 |
| | gene cluster | |
| 711 | Tailocin | MIC-38993 |
| | gene cluster | |
| 712 | Tailocin | MIC-38993 |
| | gene cluster | |
| 713 | Tailocin | MIC-38993 |
| | gene cluster | |
| 714 | Tailocin | MIC-38993 |
| | gene cluster | |
| 715 | Tailocin | MIC-38993 |
| | gene cluster | |
| 716 | Tailocin | MIC-38993 |
| | gene cluster | |
| 717 | Tailocin | MIC-38993 |
| | gene cluster | |
| 718 | Tailocin | MIC-38993 |
| | gene cluster | |
| 719 | Tailocin | MIC-38993 |
| | gene cluster | |
| 720 | Tailocin | MIC-38993 |
| | gene cluster | |
| 721 | Tailocin | MIC-38993 |
| | gene cluster | |
| 722 | Tailocin | MIC-38993 |
| | gene cluster | |
| 723 | Tailocin | MIC-38993 |
| | gene cluster | |
| 724 | Tailocin | MIC-38993 |
| | gene cluster | |
| 725 | Tailocin | MIC-38993 |
| | gene cluster | |
| 726 | Tailocin | MIC-38993 |
| | gene cluster | |
| 727 | Tailocin | MIC-38993 |
| | gene cluster | |
| 728 | Tailocin | MIC-38993, MIC-94458, MIC-30352, |
| | gene cluster | MIC-82867 |
| 729 | Tailocin | MIC-94135 |
| | gene cluster | |
| 730 | Tailocin | MIC-94135 |
| | gene cluster | |
| 731 | Tailocin | MIC-94135 |
| | gene cluster | |
| 732 | Tailocin | MIC-94135 |
| | gene cluster | |
| 733 | Tailocin | MIC-94135 |
| | gene cluster | |
| 734 | Tailocin | MIC-94135 |
| | gene cluster | |
| 735 | Tailocin | MIC-94135 |
| | gene cluster | |
| 736 | Tailocin | MIC-94135 |
| | gene cluster | |
| 737 | Tailocin | MIC-94135 |
| | gene cluster | |
| 738 | Tailocin | MIC-94135 |
| | gene cluster | |
| 739 | Tailocin | MIC-94135 |
| | gene cluster | |
| 740 | Tailocin | MIC-94458, MIC-30352, MIC-82867 |
| | gene cluster | |
| 741 | Tailocin | MIC-94458, MIC-30352, MIC-82867 |
| | gene cluster | |
| 742 | Tailocin | MIC-94458, MIC-30352, MIC-82867 |
| | gene cluster | |
| 743 | Tailocin | MIC-94458, MIC-30352, MIC-82867 |
| | gene cluster | |
| 744 | Tailocin | MIC-94458, MIC-30352, MIC-82867 |
| | gene cluster | |
| 745 | Tailocin | MIC-94458, MIC-30352, MIC-82867 |
| | gene cluster | |
| 746 | Tailocin | MIC-94458, MIC-30352, MIC-82867 |
| | gene cluster | |
| 747 | Tailocin | MIC-94458, MIC-30352, MIC-82867 |
| | gene cluster | |
| 748 | Tailocin | MIC-94458, MIC-30352, MIC-82867 |
| | gene cluster | |
| 749 | Tailocin | MIC-94458, MIC-30352, MIC-82867 |
| | gene cluster | |
| 750 | Tailocin | MIC-94458, MIC-30352, MIC-82867 |
| | gene cluster | |
| 751 | Tailocin | MIC-94458, MIC-30352, MIC-82867 |
| | gene cluster | |
| 752 | Tailocin | MIC-94458, MIC-30352, MIC-82867 |
| | gene cluster | |
| 753 | Tailocin | MIC-94458, MIC-30352, MIC-82867 |
| | gene cluster | |
| 754 | Tailocin | MIC-94458, MIC-30352, MIC-82867 |
| | gene cluster | |
| 755 | Tailocin | MIC-94458, MIC-30352, MIC-82867 |
| | gene cluster | |
| 756 | Tailocin | MIC-94458, MIC-30352, MIC-82867 |
| | gene cluster | |
| 757 | Tailocin | MIC-94458, MIC-30352, MIC-82867 |
| | gene cluster | |
| 758 | Tailocin | MIC-94458, MIC-30352, MIC-82867 |
| | gene cluster | |
| 759 | Tailocin | MIC-94458, MIC-30352, MIC-82867 |
| | gene cluster | |
| 760 | Tailocin | MIC-94458, MIC-30352, MIC-82867 |
| | gene cluster | |
| 761 | Tailocin | MIC-94458, MIC-30352, MIC-82867 |
| | gene cluster | |
| 762 | Tailocin | MIC-94458, MIC-30352, MIC-82867 |
| | gene cluster | |
| 763 | Tailocin | MIC-94458, MIC-30352, MIC-82867 |
| | gene cluster | |
| 764 | Tailocin | MIC-94458, MIC-30352, MIC-82867 |
| | gene cluster | |
| 765 | Tailocin | MIC-94458, MIC-30352, MIC-82867 |
| | gene cluster | |
| 766 | Tailocin | MIC-94458, MIC-30352, MIC-82867 |
| | gene cluster | |
| 767 | Tailocin | MIC-94458, MIC-30352, MIC-82867 |
| | gene cluster | |
| 768 | Tailocin | MIC-94458, MIC-30352, MIC-82867 |
| | gene cluster | |
| 769 | Tailocin | MIC-94458, MIC-30352, MIC-82867 |
| | gene cluster | |
| 770 | Tailocin | MIC-94458, MIC-30352, MIC-82867 |
| | gene cluster | |
| 771 | Tailocin | MIC-94458, MIC-30352, MIC-82867 |
| | gene cluster | |
| 772 | Tailocin | MIC-94458, MIC-30352, MIC-82867 |
| | gene cluster | |
| 773 | Tailocin | MIC-94458, MIC-30352, MIC-82867 |
| | gene cluster | |
| 774 | Tailocin | MIC-94458, MIC-30352, MIC-82867 |
| | gene cluster | |
| 775 | Tailocin | MIC-94458, MIC-30352, MIC-82867 |
| | gene cluster | |
| 776 | Tailocin | MIC-94458, MIC-30352, MIC-82867 |
| | gene cluster | |
| 777 | Tailocin | MIC-94458, MIC-30352, MIC-82867 |
| | gene cluster | |
| 778 | Tailocin | MIC-94458, MIC-30352, MIC-82867 |
| | gene cluster | |
| 779 | Tailocin | MIC-94458, MIC-30352, MIC-82867 |
| | gene cluster | |
| 780 | Tailocin | MIC-94458, MIC-30352, MIC-82867 |
| | gene cluster | |
| 781 | Tailocin | MIC-94458, MIC-30352, MIC-82867 |
| | gene cluster | |
| 782 | Tailocin | MIC-46385, MIC-62164 |
| | gene cluster | |
| 783 | Tailocin | MIC-46385, MIC-62164 |
| | gene cluster | |
| 784 | Tailocin | MIC-46385, MIC-62164 |
| | gene cluster | |
| 785 | Tailocin | MIC-46385, MIC-62164 |
| | gene cluster | |
| 786 | Tailocin | MIC-46385, MIC-62164 |
| | gene cluster | |
| 787 | Tailocin | MIC-46385, MIC-62164 |
| | gene cluster | |
| 788 | Tailocin | MIC-46385, MIC-62164 |
| | gene cluster | |
| 789 | Tailocin | MIC-46385, MIC-62164 |
| | gene cluster | |
| 790 | Tailocin | MIC-46385, MIC-62164 |
| | gene cluster | |
| 791 | Tailocin | MIC-36254 |
| | gene cluster | |
| 792 | Tailocin | MIC-36254 |
| | gene cluster | |
| 793 | Tailocin | MIC-36254 |
| | gene cluster | |
| 794 | Tailocin | MIC-36254 |
| | gene cluster | |
| 795 | Tailocin | MIC-36254 |
| | gene cluster | |
| 796 | Tailocin | MIC-14970, MIC-11290 |
| | gene cluster | |
| 797 | Tailocin | MIC-14970, MIC-11290 |
| | gene cluster | |
| 798 | Tailocin | MIC-14970, MIC-11290 |
| | gene cluster | |
| 799 | Tailocin | MIC-14970, MIC-11290 |
| | gene cluster | |
| 800 | Tailocin | MIC-14970, MIC-11290 |
| | gene cluster | |
| 801 | Tailocin | MIC-14970, MIC-11290 |
| | gene cluster | |
| 802 | Tailocin | MIC-14970, MIC-11290 |
| | gene cluster | |
| 803 | Tailocin | MIC-14970, MIC-11290 |
| | gene cluster | |
| 804 | Tailocin | MIC-14970, MIC-11290 |
| | gene cluster | |
| 805 | Tailocin | MIC-14970, MIC-11290 |
| | gene cluster | |
| 806 | Tailocin | MIC-14970, MIC-11290 |
| | gene cluster | |
| 807 | Tailocin | MIC-14970, MIC-11290 |
| | gene cluster | |
| 808 | Tailocin | MIC-14970, MIC-11290 |
| | gene cluster | |
| 809 | Tailocin | MIC-14970, MIC-11290 |
| | gene cluster | |
| 810 | Tailocin | MIC-14970, MIC-11290 |
| | gene cluster | |
| 811 | Tailocin | MIC-14970, MIC-11290 |
| | gene cluster | |
| 812 | Tailocin | MIC-14970, MIC-11290 |
| | gene cluster | |
| 813 | Tailocin | MIC-14970, MIC-11290 |
| | gene cluster | |
| 814 | Tailocin | MIC-14970, MIC-11290 |
| | gene cluster | |
| 815 | Tailocin | MIC-14970, MIC-11290 |
| | gene cluster | |
| 816 | Tailocin | MIC-14970, MIC-11290 |
| | gene cluster | |
| 817 | Tailocin | MIC-14970, MIC-11290 |
| | gene cluster | |
| 818 | Tailocin | MIC-87084 |
| | gene cluster | |
| 819 | Tailocin | MIC-87084 |
| | gene cluster | |
| 820 | Tailocin | MIC-87084 |
| | gene cluster | |
| 821 | Tailocin | MIC-87084 |
| | gene cluster | |
| 822 | Tailocin | MIC-87084 |
| | gene cluster | |
| 823 | Tailocin | MIC-87084 |
| | gene cluster | |
| 824 | Tailocin | MIC-87084 |
| | gene cluster | |
| 825 | Tailocin | MIC-36497 |
| | gene cluster | |
| 826 | Tailocin | MIC-36497 |
| | gene cluster | |
| 827 | Tailocin | MIC-36497 |
| | gene cluster | |
| 828 | Tailocin | MIC-36497 |
| | gene cluster | |
| 829 | Tailocin | MIC-36497 |
| | gene cluster | |
| 830 | Tailocin | MIC-36497 |
| | gene cluster | |
| 831 | Tailocin | MIC-36497 |
| | gene cluster | |
| 832 | Tailocin | MIC-36497 |
| | gene cluster | |
| 833 | Tailocin | MIC-36497 |
| | gene cluster | |
| 834 | Tailocin | MIC-36497 |
| | gene cluster | |
| 835 | Tailocin | MIC-36497 |
| | gene cluster | |
| 836 | Tailocin | MIC-36497 |
| | gene cluster | |
| 837 | Tailocin | MIC-36497 |
| | gene cluster | |
| 838 | Tailocin | MIC-36497 |
| | gene cluster | |
| 839 | Tailocin | MIC-36497 |
| | gene cluster | |
| 840 | Tailocin | MIC-36497 |
| | gene cluster | |
| 841 | Tailocin | MIC-36497 |
| | gene cluster | |
| 842 | Tailocin | MIC-36497 |
| | gene cluster | |
| 843 | Tailocin | MIC-36497 |
| | gene cluster | |
| 844 | Tailocin | MIC-29285 |
| | gene cluster | |
| 845 | Tailocin | MIC-29285 |
| | gene cluster | |
| 846 | Tailocin | MIC-29285 |
| | gene cluster | |
| 847 | Tailocin | MIC-29285 |
| | gene cluster | |
| 848 | Tailocin | MIC-29285 |
| | gene cluster | |
| 849 | Tailocin | MIC-29285 |
| | gene cluster | |
| 850 | Tailocin | MIC-29285 |
| | gene cluster | |
| 851 | Tailocin | MIC-29285 |
| | gene cluster | |
| 852 | Tailocin | MIC-29285 |
| | gene cluster | |
| 853 | Tailocin | MIC-29285 |
| | gene cluster | |
| 854 | Tailocin | MIC-29285 |
| | gene cluster | |
| 855 | Tailocin | MIC-29285 |
| | gene cluster | |
| 856 | Tailocin | MIC-29285 |
| | gene cluster | |
| 857 | Tailocin | MIC-29285 |
| | gene cluster | |
| 858 | Tailocin | MIC-29285 |
| | gene cluster | |
| 859 | Tailocin | MIC-29285 |
| | gene cluster | |
| 860 | Tailocin | MIC-29285 |
| | gene cluster | |
| 861 | Tailocin | MIC-29285 |
| | gene cluster | |
| 862 | Tailocin | MIC-29285 |
| | gene cluster | |
| 863 | Tailocin | MIC-29285 |
| | gene cluster | |
| 864 | Tailocin | MIC-29285 |
| | gene cluster | |
| 865 | Tailocin | MIC-29285 |
| | gene cluster | |
| 866 | Tailocin | MIC-29285 |
| | gene cluster | |
| 867 | Tailocin | MIC-29285 |
| | gene cluster | |
| 868 | Tailocin | MIC-29285 |
| | gene cluster | |
| 869 | Tailocin | MIC-29285 |
| | gene cluster | |
| 870 | Tailocin | MIC-29285 |
| | gene cluster | |
| 871 | Tailocin | MIC-29285 |
| | gene cluster | |
| 872 | Tailocin | MIC-29285 |
| | gene cluster | |
| 873 | Tailocin | MIC-29285 |
| | gene cluster | |
| 874 | Tailocin | MIC-29285 |
| | gene cluster | |
| 875 | Tailocin | MIC-29285 |
| | gene cluster | |
| 876 | Tailocin | MIC-29285 |
| | gene cluster | |
| 877 | Tailocin | MIC-29285 |
| | gene cluster | |
| 878 | Tailocin | MIC-29285 |
| | gene cluster | |
| 879 | Tailocin | MIC-29285 |
| | gene cluster | |
| 880 | Tailocin | MIC-29285 |
| | gene cluster | |
| 881 | Tailocin | MIC-29285 |
| | gene cluster | |
| 882 | Tailocin | MIC-29285 |
| | gene cluster | |
| 883 | Tailocin | MIC-29285 |
| | gene cluster | |
| 884 | Tailocin | MIC-29285 |
| | gene cluster | |
| 885 | Tailocin | MIC-29285 |
| | gene cluster | |
| 886 | Tailocin | MIC-29285 |
| | gene cluster | |
| 887 | Tailocin | MIC-29285 |
| | gene cluster | |
| 888 | Tailocin | MIC-29285 |
| | gene cluster | |
| 889 | Tailocin | MIC-29285 |
| | gene cluster | |
| 890 | Tailocin | MIC-29285 |
| | gene cluster | |
| 891 | Tailocin | MIC-29285 |
| | gene cluster | |
| 892 | Tailocin | MIC-29285 |
| | gene cluster | |
| 893 | Tailocin | MIC-29285 |
| | gene cluster | |
| 894 | Tailocin | MIC-29285 |
| | gene cluster | |
| 895 | Tailocin | MIC-29285 |
| | gene cluster | |
| 896 | Tailocin | MIC-29285 |
| | gene cluster | |
| 897 | Tailocin | MIC-29285 |
| | gene cluster | |
| 898 | Tailocin | MIC-29285 |
| | gene cluster | |
| 899 | Tailocin | MIC-29285 |
| | gene cluster | |
| 900 | Tailocin | MIC-29285 |
| | gene cluster | |
| 901 | Tailocin | MIC-29285 |
| | gene cluster | |
| 902 | Tailocin | MIC-29285 |
| | gene cluster | |
| 903 | Tailocin | MIC-29285 |
| | gene cluster | |
| 904 | Tailocin | MIC-29285 |
| | gene cluster | |
| 905 | Tailocin | MIC-29285 |
| | gene cluster | |
| 906 | Tailocin | MIC-29285 |
| | gene cluster | |
| 907 | Tailocin | MIC-29285 |
| | gene cluster | |
| 908 | Tailocin | MIC-82689 |
| | gene cluster | |
| 909 | Tailocin | MIC-82689 |
| | gene cluster | |
| 910 | Tailocin | MIC-82689 |
| | gene cluster | |
| 911 | Tailocin | MIC-82689 |
| | gene cluster | |
| 912 | Tailocin | MIC-82689 |
| | gene cluster | |
| 913 | Tailocin | MIC-82689 |
| | gene cluster | |
| 914 | Tailocin | MIC-82689 |
| | gene cluster | |
| 915 | Tailocin | MIC-82689 |
| | gene cluster | |
| 916 | Tailocin | MIC-82689 |
| | gene cluster | |
| 917 | Tailocin | MIC-82689 |
| | gene cluster | |
| 918 | Tailocin | MIC-82689 |
| | gene cluster | |
| 919 | Tailocin | MIC-82689 |
| | gene cluster | |
| 920 | Tailocin | MIC-82689 |
| | gene cluster | |
| 921 | Tailocin | MIC-79613 |
| | gene cluster | |
| 922 | Tailocin | MIC-79613 |
| | gene cluster | |
| 923 | Tailocin | MIC-79613 |
| | gene cluster | |
| 924 | Tailocin | MIC-79613 |
| | gene cluster | |
| 925 | Tailocin | MIC-79613 |
| | gene cluster | |
| 926 | Tailocin | MIC-79613 |
| | gene cluster | |
| 927 | Tailocin | MIC-79613, MIC-53518 |
| | gene cluster | |
| 928 | Tailocin | MIC-79613, MIC-53518 |
| | gene cluster | |
| 929 | Tailocin | MIC-79613, MIC-53518 |
| | gene cluster | |
| 930 | Tailocin | MIC-79613, MIC-53518 |
| | gene cluster | |
| 931 | Tailocin | MIC-79613, MIC-53518 |
| | gene cluster | |
| 932 | Tailocin | MIC-79613, MIC-53518 |
| | gene cluster | |
| 933 | Tailocin | MIC-79613, MIC-53518 |
| | gene cluster | |
| 934 | Type VI | MIC-87588, MIC-86605, MIC-54642, |
| | secretion | MIC-61954, MIC-29662 |
| | system | |
| 935 | Type VI | MIC-87588, MIC-86605, MIC-54642, |
| | secretion | MIC-61954, MIC-29662 |
| | system | |
| 936 | Type VI | MIC-87588, MIC-86605, MIC-54642, |
| | secretion | MIC-61954, MIC-29662 |
| | system | |
| 937 | Type VI | MIC-87588, MIC-86605, MIC-54642, |
| | secretion | MIC-61954, MIC-29662 |
| | system | |
| 938 | Type VI | MIC-70076, MIC-73019, MIC-73547 |
| | secretion | |
| | system | |
| 939 | Type VI | MIC-70076, MIC-73019, MIC-73547 |
| | secretion | |
| | system | |
| 940 | Type VI | MIC-70076, MIC-73019, MIC-73547 |
| | secretion | |
| | system | |
| 941 | Type VI | MIC-70076, MIC-73019, MIC-73547 |
| | secretion | |
| | system | |
| 942 | Type VI | MIC-68901, MIC-19814 |
| | secretion | |
| | system | |
| 943 | Type VI | MIC-68773, MIC-14970, MIC-11290 |
| | secretion | |
| | system | |
| 944 | Type VI | MIC-81265, MIC-88834 |
| | secretion | |
| | system | |
| 945 | Type VI | MIC-68773 |
| | secretion | |
| | system | |
| 946 | Type VI | MIC-68773 |
| | secretion | |
| | system | |
| 947 | Type VI | MIC-68773 |
| | secretion | |
| | system | |
| 948 | Type VI | MIC-54778 |
| | secretion | |
| | system | |
| 949 | Type VI | MIC-54778 |
| | secretion | |
| | system | |
| 950 | Type VI | MIC-54778 |
| | secretion | |
| | system | |
| 951 | Type VI | MIC-54778 |
| | secretion | |
| | system | |
| 952 | Type VI | MIC-87198 |
| | secretion | |
| | system | |
| 953 | Type VI | MIC-87198 |
| | secretion | |
| | system | |
| 954 | Type VI | MIC-87198 |
| | secretion | |
| | system | |
| 955 | Type VI | MIC-87198 |
| | secretion | |
| | system | |
| 956 | Type VI | MIC-90405 |
| | secretion | |
| | system | |
| 957 | Type VI | MIC-90405 |
| | secretion | |
| | system | |
| 958 | Type VI | MIC-90405 |
| | secretion | |
| | system | |
| 959 | Type VI | MIC-14439 |
| | secretion | |
| | system | |
| 960 | Type VI | MIC-14439 |
| | secretion | |
| | system | |
| 961 | Type VI | MIC-14439 |
| | secretion | |
| | system | |
| 962 | Type VI | MIC-14439 |
| | secretion | |
| | system | |
| 963 | Type VI | MIC-79613, MIC-53518 |
| | secretion | |
| | system | |
| 964 | Type VI | MIC-83010 |
| | secretion | |
| | system | |
| 965 | Type VI | MIC-83740 |
| | secretion | |
| | system | |
| 966 | Type VI | MIC-80455 |
| | secretion | |
| | system | |
| 967 | Type VI | MIC-80455 |
| | secretion | |
| | system | |
| 968 | Type VI | MIC-80455 |
| | secretion | |
| | system | |
| 969 | Type VI | MIC-80455 |
| | secretion | |
| | system | |
| 970 | Type VI | MIC-94504 |
| | secretion | |
| | system | |
| 971 | Type VI | MIC-94504 |
| | secretion | |
| | system | |
| 972 | Type VI | MIC-94504 |
| | secretion | |
| | system | |
| 973 | Type VI | MIC-94504 |
| | secretion | |
| | system | |
| 974 | Type VI | MIC-24837, MIC-55579 |
| | secretion | |
| | system | |
| 975 | Type VI | MIC-24837, MIC-55579 |
| | secretion | |
| | system | |
| 976 | Type VI | MIC-24837, MIC-55579 |
| | secretion | |
| | system | |
| 977 | Type VI | MIC-24837, MIC-55579 |
| | secretion | |
| | system | |
| 978 | Type VI | MIC-19845 |
| | secretion | |
| | system | |
| 979 | Type VI | MIC-84492 |
| | secretion | |
| | system | |
| 980 | Type VI | MIC-84492 |
| | secretion | |
| | system | |
| 981 | Type VI | MIC-84492 |
| | secretion | |
| | system | |
| 982 | Type VI | MIC-50391, MIC-69701, MIC-52924 |
| | secretion | |
| | system | |
| 983 | Type VI | MIC-50391, MIC-69701, MIC-52924 |
| | secretion | |
| | system | |
| 984 | Type VI | MIC-50391, MIC-69701, MIC-52924 |
| | secretion | |
| | system | |
| 985 | Type VI | MIC-50391, MIC-69701, MIC-52924 |
| | secretion | |
| | system | |
| 986 | Type VI | MIC-85267 |
| | secretion | |
| | system | |
| 987 | Type VI | MIC-90405, MIC-82689 |
| | secretion | |
| | system | |
| 988 | Type VI | MIC-75437, MIC-20446 |
| | secretion | |
| | system | |
| 989 | Type VI | MIC-38993 |
| | secretion | |
| | system | |
| 990 | Type VI | MIC-38993 |
| | secretion | |
| | system | |
| 991 | Type VI | MIC-38993 |
| | secretion | |
| | system | |
| 992 | Type VI | MIC-38993 |
| | secretion | |
| | system | |
| 993 | Type VI | MIC-94135 |
| | secretion | |
| | system | |
| 994 | Type VI | MIC-94458, MIC-30352, MIC-82867 |
| | secretion | |
| | system | |
| 995 | Type VI | MIC-94458, MIC-30352, MIC-82867 |
| | secretion | |
| | system | |
| 996 | Type VI | MIC-94458, MIC-30352, MIC-82867 |
| | secretion | |
| | system | |
| 997 | Type VI | MIC-94458, MIC-30352, MIC-82867 |
| | secretion | |
| | system | |
| 998 | Type VI | MIC-46385, MIC-62164, MIC-87894 |
| | secretion | |
| | system | |
| 999 | Type VI | MIC-46385, MIC-62164, MIC-87894 |
| | secretion | |
| | system | |
| 1000 | Type VI | MIC-46385, MIC-62164, MIC-87894 |
| | secretion | |
| | system | |
| 1001 | Type VI | MIC-46385, MIC-62164, MIC-87894 |
| | secretion | |
| | system | |
| 1002 | Type VI | MIC-36254 |
| | secretion | |
| | system | |
| 1003 | Type VI | MIC-14970, MIC-11290 |
| | secretion | |
| | system | |
| 1004 | Type VI | MIC-14970, MIC-11290 |
| | secretion | |
| | system | |
| 1005 | Type VI | MIC-14970, MIC-11290 |
| | secretion | |
| | system | |
| 1006 | Type VI | MIC-87084 |
| | secretion | |
| | system | |
| 1007 | Type VI | MIC-36497 |
| | secretion | |
| | system | |
| 1008 | Type VI | MIC-36497 |
| | secretion | |
| | system | |
| 1009 | Type VI | MIC-36497 |
| | secretion | |
| | system | |
| 1010 | Type VI | MIC-36497 |
| | secretion | |
| | system | |
| 1011 | Type VI | MIC-29285 |
| | secretion | |
| | system | |
| 1012 | Type VI | MIC-82689 |
| | secretion | |
| | system | |
| 1013 | Type VI | MIC-82689 |
| | secretion | |
| | system | |
| 1014 | Type VI | MIC-82689 |
| | secretion | |
| | system | |
| 1015 | Type VI | MIC-87588, MIC-86605, MIC-54642, |
| | secretion | MIC-61954, MIC-29662 |
| | system | |
| | putative | |
| | effector | |
| 1016 | Type VI | MIC-87588, MIC-86605, MIC-54642, |
| | secretion | MIC-61954, MIC-29662 |
| | system | |
| | putative | |
| | effector | |
| 1017 | Type VI | MIC-87588, MIC-86605, MIC-54642, |
| | secretion | MIC-61954, MIC-29662 |
| | system | |
| | putative | |
| | effector | |
| 1018 | Type VI | MIC-70076, MIC-73019, MIC-73547 |
| | secretion | |
| | system | |
| | putative | |
| | effector | |
| 1019 | Type VI | MIC-70076, MIC-73019, MIC-73547 |
| | secretion | |
| | system | |
| | putative | |
| | effector | |
| 1020 | Type VI | MIC-70076, MIC-73019, MIC-73547 |
| | secretion | |
| | system | |
| | putative | |
| | effector | |
| 1021 | Type VI | MIC-70076, MIC-73019, MIC-73547 |
| | secretion | |
| | system | |
| | putative | |
| | effector | |
| 1022 | Type VI | MIC-70076, MIC-73019, MIC-73547 |
| | secretion | |
| | system | |
| | putative | |
| | effector | |
| 1023 | Type VI | MIC-52924 |
| | secretion | |
| | system | |
| | putative | |
| | effector | |
| 1024 | Type VI | MIC-61954, MIC-29662 |
| | secretion | |
| | system | |
| | putative | |
| | effector | |
| 1025 | Type VI | MIC-68773 |
| | secretion | |
| | system | |
| | putative | |
| | effector | |
| 1026 | Type VI | MIC-68773 |
| | secretion | |
| | system | |
| | putative | |
| | effector | |
| 1027 | Type VI | MIC-68773 |
| | secretion | |
| | system | |
| | putative | |
| | effector | |
| 1028 | Type VI | MIC-68773 |
| | secretion | |
| | system | |
| | putative | |
| | effector | |
| 1029 | Type VI | MIC-54778 |
| | secretion | |
| | system | |
| | putative | |
| | effector | |
| 1030 | Type VI | MIC-87198 |
| | secretion | |
| | system | |
| | putative | |
| | effector | |
| 1031 | Type VI | MIC-87198 |
| | secretion | |
| | system | |
| | putative | |
| | effector | |
| 1032 | Type VI | MIC-87198 |
| | secretion | |
| | system | |
| | putative | |
| | effector | |
| 1033 | Type VI | MIC-87198 |
| | secretion | |
| | system | |
| | putative | |
| | effector | |
| 1034 | Type VI | MIC-90405 |
| | secretion | |
| | system | |
| | putative | |
| | effector | |
| 1035 | Type VI | MIC-90405 |
| | secretion | |
| | system | |
| | putative | |
| | effector | |
| 1036 | Type VI | MIC-90405 |
| | secretion | |
| | system | |
| | putative | |
| | effector | |
| 1037 | Type VI | MIC-90405 |
| | secretion | |
| | system | |
| | putative | |
| | effector | |
| 1038 | Type VI | MIC-14439 |
| | secretion | |
| | system | |
| | putative | |
| | effector | |
| 1039 | Type VI | MIC-14439 |
| | secretion | |
| | system | |
| | putative | |
| | effector | |
| 1040 | Type VI | MIC-14439 |
| | secretion | |
| | system | |
| | putative | |
| | effector | |
| 1041 | Type VI | MIC-14439 |
| | secretion | |
| | system | |
| | putative | |
| | effector | |
| 1042 | Type VI | MIC-54778 |
| | secretion | |
| | system | |
| | putative | |
| | effector | |
| 1043 | Type VI | MIC-54778 |
| | secretion | |
| | system | |
| | putative | |
| | effector | |
| 1044 | Type VI | MIC-54778 |
| | secretion | |
| | system | |
| | putative | |
| | effector | |
| 1045 | Type VI | MIC-80455 |
| | secretion | |
| | system | |
| | putative | |
| | effector | |
| 1046 | Type VI | MIC-80455 |
| | secretion | |
| | system | |
| | putative | |
| | effector | |
| 1047 | Type VI | MIC-80455 |
| | secretion | |
| | system | |
| | putative | |
| | effector | |
| 1048 | Type VI | MIC-80455 |
| | secretion | |
| | system | |
| | putative | |
| | effector | |
| 1049 | Type VI | MIC-87588, MIC-86605, MIC-54642 |
| | secretion | |
| | system | |
| | putative | |
| | effector | |
| 1050 | Type VI | MIC-94504 |
| | secretion | |
| | system | |
| | putative | |
| | effector | |
| 1051 | Type VI | MIC-94504 |
| | secretion | |
| | system | |
| | putative | |
| | effector | |
| 1052 | Type VI | MIC-94504 |
| | secretion | |
| | system | |
| | putative | |
| | effector | |
| 1053 | Type VI | MIC-94504 |
| | secretion | |
| | system | |
| | putative | |
| | effector | |
| 1054 | Type VI | MIC-24837, MIC-55579 |
| | secretion | |
| | system | |
| | putative | |
| | effector | |
| 1055 | Type VI | MIC-24837, MIC-55579 |
| | secretion | |
| | system | |
| | putative | |
| | effector | |
| 1056 | Type VI | MIC-24837, MIC-55579 |
| | secretion | |
| | system | |
| | putative | |
| | effector | |
| 1057 | Type VI | MIC-24837, MIC-55579 |
| | secretion | |
| | system | |
| | putative | |
| | effector | |
| 1058 | Type VI | MIC-84492 |
| | secretion | |
| | system | |
| | putative | |
| | effector | |
| 1059 | Type VI | MIC-50391, MIC-69701 |
| | secretion | |
| | system | |
| | putative | |
| | effector | |
| 1060 | Type VI | MIC-50391, MIC-69701, MIC-52924 |
| | secretion | |
| | system | |
| | putative | |
| | effector | |
| 1061 | Type VI | MIC-50391, MIC-69701, MIC-52924 |
| | secretion | |
| | system | |
| | putative | |
| | effector | |
| 1062 | Type VI | MIC-50391, MIC-69701, MIC-52924 |
| | secretion | |
| | system | |
| | putative | |
| | effector | |
| 1063 | Type VI | MIC-75437, MIC-20446 |
| | secretion | |
| | system | |
| | putative | |
| | effector | |
| 1064 | Type VI | MIC-38993 |
| | secretion | |
| | system | |
| | putative | |
| | effector | |
| 1065 | Type VI | MIC-38993 |
| | secretion | |
| | system | |
| | putative | |
| | effector | |
| 1066 | Type VI | MIC-38993 |
| | secretion | |
| | system | |
| | putative | |
| | effector | |
| 1067 | Type VI | MIC-38993 |
| | secretion | |
| | system | |
| | putative | |
| | effector | |
| 1068 | Type VI | MIC-94458, MIC-30352, MIC-82867 |
| | secretion | |
| | system | |
| | putative | |
| | effector | |
| 1069 | Type VI | MIC-94458, MIC-30352, MIC-82867 |
| | secretion | |
| | system | |
| | putative | |
| | effector | |
| 1070 | Type VI | MIC-94458, MIC-30352, MIC-82867 |
| | secretion | |
| | system | |
| | putative | |
| | effector | |
| 1071 | Type VI | MIC-94458, MIC-30352, MIC-82867 |
| | secretion | |
| | system | |
| | putative | |
| | effector | |
| 1072 | Type VI | MIC-94458, MIC-30352, MIC-82867 |
| | secretion | |
| | system | |
| | putative | |
| | effector | |
| 1073 | Type VI | MIC-46385, MIC-62164 |
| | secretion | |
| | system | |
| | putative | |
| | effector | |
| 1074 | Type VI | MIC-46385, MIC-62164, MIC-87894 |
| | secretion | |
| | system | |
| | putative | |
| | effector | |
| 1075 | Type VI | MIC-46385, MIC-62164, MIC-87894 |
| | secretion | |
| | system | |
| | putative | |
| | effector | |
| 1076 | Type VI | MIC-46385, MIC-62164, MIC-87894 |
| | secretion | |
| | system | |
| | putative | |
| | effector | |
| 1077 | Type VI | MIC-46385, MIC-62164, MIC-87894 |
| | secretion | |
| | system | |
| | putative | |
| | effector | |
| 1078 | Type VI | MIC-14970, MIC-11290 |
| | secretion | |
| | system | |
| | putative | |
| | effector | |
| 1079 | Type VI | MIC-14970, MIC-11290 |
| | secretion | |
| | system | |
| | putative | |
| | effector | |
| 1080 | Type VI | MIC-14970, MIC-11290 |
| | secretion | |
| | system | |
| | putative | |
| | effector | |
| 1081 | Type VI | MIC-14970, MIC-11290 |
| | secretion | |
| | system | |
| | putative | |
| | effector | |
| 1082 | Type VI | MIC-36497 |
| | secretion | |
| | system | |
| | putative | |
| | effector | |
| 1083 | Type VI | MIC-36497 |
| | secretion | |
| | system | |
| | putative | |
| | effector | |
| 1084 | Type VI | MIC-36497 |
| | secretion | |
| | system | |
| | putative | |
| | effector | |
| 1085 | Type VI | MIC-36497 |
| | secretion | |
| | system | |
| | putative | |
| | effector | |
| 1086 | Type VI | MIC-82689 |
| | secretion | |
| | system | |
| | putative | |
| | effector | |
| 1087 | Type VI | MIC-82689 |
| | secretion | |
| | system | |
| | putative | |
| | effector | |
| 1088 | Type VI | MIC-82689 |
| | secretion | |
| | system | |
| | putative | |
| | effector | |
| 1089 | Type VI | MIC-82689 |
| | secretion | |
| | system | |
| | putative | |
| | effector | |

TABLE 2B
Protein sequences of endophytes

| SEQ ID | Sequence Description | Endophytes |
|---|---|---|
| 1090 | Flagellin | MIC-70076 |
| 1091 | Flagellin | MIC-70076 |
| 1092 | Flagellin | MIC-70076 |
| 1093 | Flagellin | MIC-70076 |
| 1094 | Flagellin | MIC-70076 |
| 1095 | Flagellin | MIC-70076 |
| 1096 | Flagellin | MIC-70076 |
| 1097 | Flagellin | MIC-73019, MIC-87588, MIC-86605, |
| | | MIC-54642, MIC-94504, MIC-24837, |
| | | MIC-55579, MIC-61954, MIC-29662, |
| | | MIC-38993, MIC-73547, MIC-14970, |
| | | MIC-11290, MIC-36497, MIC-82689 |
| 1098 | Flagellin | MIC-83010, MIC-68773, MIC-87588, |
| | | MIC-86605, MIC-54642, MIC-94504, |
| | | MIC-24837, MIC-55579, MIC-87198, |
| | | MIC-61954, MIC-29662, MIC-90405, |
| | | MIC-75437, MIC-38993, MIC-20446, |
| | | MIC-14970, MIC-11290, MIC-36497 |
| 1099 | Flagellin | MIC-68773, MIC-80455, MIC-87588, |
| | | MIC-86605, MIC-54642, MIC-94504, |
| | | MIC-24837, MIC-55579, MIC-87198, |
| | | MIC-61954, MIC-29662, MIC-90405, |
| | | MIC-38993, MIC-14970, MIC-11290, |
| | | MIC-36497, MIC-82689 |
| 1100 | Flagellin | MIC-68773, MIC-87588, MIC-86605, |
| | | MIC-54642, MIC-94504, MIC-24837, |
| | | MIC-55579, MIC-87198, MIC-61954, |
| | | MIC-29662, MIC-90405, MIC-38993, |
| | | MIC-14970, MIC-11290, MIC-36497 |
| 1101 | Flagellin | MIC-68901, MIC-81265, MIC-88834, |
| | | MIC-46385, MIC-87894 |
| 1102 | Flagellin | MIC-68773, MIC-86605, MIC-54642, |
| | | MIC-61954, MIC-29662, MIC-11290 |
| 1103 | Flagellin | MIC-70076, MIC-73019, MIC-14439, |
| | | MIC-73547 |
| 1104 | Flagellin | MIC-68773, MIC-86605, MIC-61954, |
| | | MIC-29662, MIC-11290 |
| 1105 | Flagellin | MIC-70076, MIC-73019, MIC-54778, |
| | | MIC-73547 |
| 1106 | Flagellin | MIC-70076, MIC-73019, MIC-73547 |
| 1107 | Flagellin | MIC-81265 |
| 1108 | Flagellin | MIC-61954 |
| 1109 | Flagellin | MIC-61954 |
| 1110 | Flagellin | MIC-61954 |
| 1111 | Flagellin | MIC-61954 |
| 1112 | Flagellin | MIC-68901, MIC-46385, MIC-87894 |
| 1113 | Flagellin | MIC-52924 |
| 1114 | Flagellin | MIC-68901 |
| 1115 | Flagellin | MIC-68773, MIC-54642, MIC-11290 |
| 1116 | Flagellin | MIC-73019, MIC-73547 |
| 1117 | Flagellin | MIC-73019, MIC-73547 |
| 1118 | Flagellin | MIC-73019, MIC-73547 |
| 1119 | Flagellin | MIC-82330 |
| 1120 | Flagellin | MIC-82330 |
| 1121 | Flagellin | MIC-82330 |
| 1122 | Flagellin | MIC-82330 |
| 1123 | Flagellin | MIC-82330, MIC-83740 |
| 1124 | Flagellin | MIC-82330, MIC-84492 |
| 1125 | Flagellin | MIC-82330, MIC-84492 |
| 1126 | Flagellin | MIC-68773 |
| 1127 | Flagellin | MIC-68773 |
| 1128 | Flagellin | MIC-68773 |
| 1129 | Flagellin | MIC-54778 |
| 1130 | Flagellin | MIC-54778 |
| 1131 | Flagellin | MIC-54778 |
| 1132 | Flagellin | MIC-54778 |
| 1133 | Flagellin | MIC-19814 |
| 1134 | Flagellin | MIC-19814 |
| 1135 | Flagellin | MIC-87588 |
| 1136 | Flagellin | MIC-87588 |
| 1137 | Flagellin | MIC-24837 |
| 1138 | Flagellin | MIC-24837 |
| 1139 | Flagellin | MIC-87198 |
| 1140 | Flagellin | MIC-87198 |
| 1141 | Flagellin | MIC-87198 |
| 1142 | Flagellin | MIC-87198 |
| 1143 | Flagellin | MIC-90405 |
| 1144 | Flagellin | MIC-90405 |
| 1145 | Flagellin | MIC-90405 |
| 1146 | Flagellin | MIC-90405 |
| 1147 | Flagellin | MIC-90405 |
| 1148 | Flagellin | MIC-14970 |
| 1149 | Flagellin | MIC-68901 |
| 1150 | Flagellin | MIC-68901 |
| 1151 | Flagellin | MIC-88834 |
| 1152 | Flagellin | MIC-88834 |
| 1153 | Flagellin | MIC-14439 |
| 1154 | Flagellin | MIC-14439 |
| 1155 | Flagellin | MIC-14439 |
| 1156 | Flagellin | MIC-54642 |
| 1157 | Flagellin | MIC-29662 |
| 1158 | Flagellin | MIC-79613 |
| 1159 | Flagellin | MIC-79613 |
| 1160 | Flagellin | MIC-79613 |
| 1161 | Flagellin | MIC-79613 |
| 1162 | Flagellin | MIC-79613, MIC-53518 |
| 1163 | Flagellin | MIC-79613, MIC-53518 |
| 1164 | Flagellin | MIC-79613, MIC-53518 |
| 1165 | Flagellin | MIC-53518 |
| 1166 | Flagellin | MIC-53518 |
| 1167 | Flagellin | MIC-53518 |
| 1168 | Flagellin | MIC-53518 |
| 1169 | Flagellin | MIC-82330 |
| 1170 | Flagellin | MIC-83010 |
| 1171 | Flagellin | MIC-83010 |
| 1172 | Flagellin | MIC-83010, MIC-75437 |
| 1173 | Flagellin | MIC-83010, MIC-75437, MIC-20446 |
| 1174 | Flagellin | MIC-83740 |
| 1175 | Flagellin | MIC-83740 |
| 1176 | Flagellin | MIC-83740 |
| 1177 | Flagellin | MIC-83740 |
| 1178 | Flagellin | MIC-83740, MIC-36254, MIC-29285 |
| 1179 | Flagellin | MIC-83740, MIC-87084 |
| 1180 | Flagellin | MIC-83740, MIC-29285 |
| 1181 | Flagellin | MIC-80455 |
| 1182 | Flagellin | MIC-80455 |
| 1183 | Flagellin | MIC-80455 |
| 1184 | Flagellin | MIC-80455 |
| 1185 | Flagellin | MIC-80455 |
| 1186 | Flagellin | MIC-80455 |
| 1187 | Flagellin | MIC-86605 |
| 1188 | Flagellin | MIC-86605 |
| 1189 | Flagellin | MIC-86605, MIC-82689 |
| 1190 | Flagellin | MIC-94504 |
| 1191 | Flagellin | MIC-94504 |
| 1192 | Flagellin | MIC-94504, MIC-14970 |
| 1193 | Flagellin | MIC-24837, MIC-55579 |
| 1194 | Flagellin | MIC-55579 |
| 1195 | Flagellin | MIC-55579 |
| 1196 | Flagellin | MIC-55579 |
| 1197 | Flagellin | MIC-55579 |
| 1198 | Flagellin | MIC-19845 |
| 1199 | Flagellin | MIC-19845 |
| 1200 | Flagellin | MIC-19845 |
| 1201 | Flagellin | MIC-19845 |
| 1202 | Flagellin | MIC-19845 |
| 1203 | Flagellin | MIC-19845, MIC-85267 |
| 1204 | Flagellin | MIC-19845, MIC-14439, MIC-82689 |
| 1205 | Flagellin | MIC-84492 |
| 1206 | Flagellin | MIC-84492 |
| 1207 | Flagellin | MIC-84492 |
| 1208 | Flagellin | MIC-84492 |
| 1209 | Flagellin | MIC-84492 |
| 1210 | Flagellin | MIC-84492, MIC-36254, MIC-29285 |
| 1211 | Flagellin | MIC-50391, MIC-69701, MIC-52924 |
| 1212 | Flagellin | MIC-50391, MIC-69701, MIC-52924 |
| 1213 | Flagellin | MIC-50391, MIC-69701, MIC-52924 |
| 1214 | Flagellin | MIC-50391, MIC-69701, MIC-52924, |
| | | MIC-82689 |
| 1215 | Flagellin | MIC-85267 |
| 1216 | Flagellin | MIC-85267 |
| 1217 | Flagellin | MIC-85267 |
| 1218 | Flagellin | MIC-85267 |
| 1219 | Flagellin | MIC-85267 |
| 1220 | Flagellin | MIC-85267 |
| 1221 | Flagellin | MIC-85267, MIC-36254 |
| 1222 | Flagellin | MIC-90405, MIC-38993 |
| 1223 | Flagellin | MIC-75437 |
| 1224 | Flagellin | MIC-75437 |
| 1225 | Flagellin | MIC-75437, MIC-20446 |
| 1226 | Flagellin | MIC-38993 |
| 1227 | Flagellin | MIC-38993 |
| 1228 | Flagellin | MIC-20446 |
| 1229 | Flagellin | MIC-20446 |
| 1230 | Flagellin | MIC-94135 |
| 1231 | Flagellin | MIC-94135 |
| 1232 | Flagellin | MIC-94135 |
| 1233 | Flagellin | MIC-94458 |
| 1234 | Flagellin | MIC-94458 |
| 1235 | Flagellin | MIC-94458 |
| 1236 | Flagellin | MIC-94458, MIC-30352, MIC-82867 |
| 1237 | Flagellin | MIC-46385, MIC-62164, MIC-87894 |
| 1238 | Flagellin | MIC-46385, MIC-87894 |
| 1239 | Flagellin | MIC-46385, MIC-87894 |
| 1240 | Flagellin | MIC-62164 |
| 1241 | Flagellin | MIC-62164 |
| 1242 | Flagellin | MIC-30352 |
| 1243 | Flagellin | MIC-82867 |
| 1244 | Flagellin | MIC-82867 |
| 1245 | Flagellin | MIC-82867 |
| 1246 | Flagellin | MIC-82867 |
| 1247 | Flagellin | MIC-36254 |
| 1248 | Flagellin | MIC-36254 |
| 1249 | Flagellin | MIC-36254 |
| 1250 | Flagellin | MIC-36254 |
| 1251 | Flagellin | MIC-36254 |
| 1252 | Flagellin | MIC-36254 |
| 1253 | Flagellin | MIC-73547 |
| 1254 | Flagellin | MIC-73547 |
| 1255 | Flagellin | MIC-73547 |
| 1256 | Flagellin | MIC-11290 |
| 1257 | Flagellin | MIC-87084 |
| 1258 | Flagellin | MIC-87084 |
| 1259 | Flagellin | MIC-87084 |
| 1260 | Flagellin | MIC-87084 |
| 1261 | Flagellin | MIC-87084 |
| 1262 | Flagellin | MIC-36497 |
| 1263 | Flagellin | MIC-36497 |
| 1264 | Flagellin | MIC-36497 |
| 1265 | Flagellin | MIC-36497, MIC-82689 |
| 1266 | Flagellin | MIC-29285 |
| 1267 | Flagellin | MIC-29285 |
| 1268 | Flagellin | MIC-29285 |
| 1269 | Flagellin | MIC-29285 |
| 1270 | Flagellin | MIC-82689 |
| 1271 | Flagellin | MIC-82689 |
| 1272 | Flagellin | MIC-82689 |
| 1273 | O-Antigen | MIC-70076, MIC-73019, MIC-73547 |
| | biosynthesis | |
| 1274 | O-Antigen | MIC-70076, MIC-73019, MIC-73547 |
| | biosynthesis | |
| 1275 | O-Antigen | MIC-70076, MIC-73019, MIC-73547 |
| | biosynthesis | |
| 1276 | O-Antigen | MIC-70076, MIC-73019, MIC-73547 |
| | biosynthesis | |
| 1277 | O-Antigen | MIC-19845 |
| | biosynthesis | |
| 1278 | O-Antigen | MIC-85267 |
| | biosynthesis | |
| 1279 | O-Antigen | MIC-38993 |
| | biosynthesis | |
| 1280 | O-Antigen | MIC-38993 |
| | biosynthesis | |
| 1281 | O-Antigen | MIC-38993, MIC-82689 |
| | biosynthesis | |
| 1282 | O-Antigen | MIC-38993, MIC-82689 |
| | biosynthesis | |
| 1283 | O-Antigen | MIC-36497 |
| | biosynthesis | |
| 1284 | O-Antigen | MIC-82689 |
| | biosynthesis | |
| 1285 | O-Antigen | MIC-82689 |
| | biosynthesis | |
| 1286 | pseudaminic | MIC-80455, MIC-87588, MIC-86605, |
| | acid biosynthesis | MIC-54642, MIC-24837, MIC-55579, |
| | | MIC-61954, MIC-29662, MIC-90405, |
| | | MIC-14970, MIC-11290 |
| 1287 | pseudaminic | MIC-87588, MIC-86605, MIC-54642, |
| | acid biosynthesis | MIC-24837, MIC-55579, MIC-61954, |
| | | MIC-29662, MIC-90405, MIC-14970, |
| | | MIC-11290 |
| 1288 | pseudaminic | MIC-70076, MIC-73019, MIC-73547 |
| | acid biosynthesis | |
| 1289 | pseudaminic | MIC-70076, MIC-73019, MIC-73547 |
| | acid biosynthesis | |
| 1290 | pseudaminic | MIC-70076, MIC-73019, MIC-73547 |
| | acid biosynthesis | |
| 1291 | pseudaminic | MIC-70076, MIC-73019, MIC-73547 |
| | acid biosynthesis | |
| 1292 | pseudaminic | MIC-70076, MIC-73019, MIC-73547 |
| | acid biosynthesis | |
| 1293 | pseudaminic | MIC-70076, MIC-73019, MIC-73547 |
| | acid biosynthesis | |
| 1294 | pseudaminic | MIC-70076, MIC-73019, MIC-73547 |
| | acid biosynthesis | |
| 1295 | pseudaminic | MIC-79613, MIC-53518 |
| | acid biosynthesis | |
| 1296 | pseudaminic | MIC-79613, MIC-53518 |
| | acid biosynthesis | |
| 1297 | pseudaminic | MIC-80455 |
| | acid biosynthesis | |
| 1298 | pseudaminic | MIC-19845 |
| | acid biosynthesis | |
| 1299 | pseudaminic | MIC-19845 |
| | acid biosynthesis | |
| 1300 | pseudaminic | MIC-19845 |
| | acid biosynthesis | |
| 1301 | pseudaminic | MIC-19845 |
| | acid biosynthesis | |
| 1302 | pseudaminic | MIC-50391, MIC-69701, MIC-52924 |
| | acid biosynthesis | |
| 1303 | pseudaminic | MIC-85267 |
| | acid biosynthesis | |
| 1304 | pseudaminic | MIC-38993 |
| | acid biosynthesis | |
| 1305 | pseudaminic | MIC-38993 |
| | acid biosynthesis | |
| 1306 | pseudaminic | MIC-38993 |
| | acid biosynthesis | |
| 1307 | pseudaminic | MIC-38993 |
| | acid biosynthesis | |
| 1308 | pseudaminic | MIC-38993 |
| | acid biosynthesis | |
| 1309 | pseudaminic | MIC-38993 |
| | acid biosynthesis | |
| 1310 | pseudaminic | MIC-38993, MIC-82689 |
| | acid biosynthesis | |
| 1311 | pseudaminic | MIC-94458, MIC-30352, MIC-82867 |
| | acid biosynthesis | |
| 1312 | pseudaminic | MIC-82689 |
| | acid biosynthesis | |
| 1313 | pseudaminic | MIC-82689 |
| | acid biosynthesis | |
| 1314 | pseudaminic | MIC-82689 |
| | acid biosynthesis | |
| 1315 | pseudaminic | MIC-82689 |
| | acid biosynthesis | |
| 1316 | pseudaminic | MIC-82689 |
| | acid biosynthesis | |
| 1317 | pseudaminic | MIC-82689 |
| | acid biosynthesis | |
| 1318 | Tailocin gene | MIC-70076, MIC-73019, MIC-87588, |
| | cluster | MIC-86605, MIC-54642, MIC-73547 |
| 1319 | Tailocin gene | MIC-87588, MIC-86605, MIC-54642, |
| | cluster | MIC-61954, MIC-29662 |
| 1320 | Tailocin gene | MIC-70076, MIC-73019, MIC-24837, |
| | cluster | MIC-55579, MIC-73547 |
| 1321 | Tailocin gene | MIC-70076, MIC-73019, MIC-24837, |
| | cluster | MIC-55579, MIC-73547 |
| 1322 | Tailocin gene | MIC-70076, MIC-73019, MIC-50391, |
| | cluster | MIC-69701, MIC-73547 |
| 1323 | Tailocin gene | MIC-70076, MIC-73019, MIC-38993, |
| | cluster | MIC-73547 |
| 1324 | Tailocin gene | MIC-70076, MIC-73019, MIC-38993, |
| | cluster | MIC-73547 |
| 1325 | Tailocin gene | MIC-70076, MIC-73019, MIC-38993, |
| | cluster | MIC-73547 |
| 1326 | Tailocin gene | MIC-70076, MIC-73019, MIC-73547 |
| | cluster | |
| 1327 | Tailocin gene | MIC-70076, MIC-73019, MIC-73547 |
| | cluster | |
| 1328 | Tailocin gene | MIC-70076, MIC-73019, MIC-73547 |
| | cluster | |
| 1329 | Tailocin gene | MIC-70076, MIC-73019, MIC-73547 |
| | cluster | |
| 1330 | Tailocin gene | MIC-70076, MIC-73019, MIC-73547 |
| | cluster | |
| 1331 | Tailocin gene | MIC-70076, MIC-73019, MIC-73547 |
| | cluster | |
| 1332 | Tailocin gene | MIC-70076, MIC-73019, MIC-73547 |
| | cluster | |
| 1333 | Tailocin gene | MIC-70076, MIC-73019, MIC-73547 |
| | cluster | |
| 1334 | Tailocin gene | MIC-70076, MIC-73019, MIC-73547 |
| | cluster | |
| 1335 | Tailocin gene | MIC-70076, MIC-73019, MIC-73547 |
| | cluster | |
| 1336 | Tailocin gene | MIC-70076, MIC-73019, MIC-73547 |
| | cluster | |
| 1337 | Tailocin gene | MIC-70076, MIC-73019, MIC-73547 |
| | cluster | |
| 1338 | Tailocin gene | MIC-70076, MIC-73019, MIC-73547 |
| | cluster | |
| 1339 | Tailocin gene | MIC-70076, MIC-73019, MIC-73547 |
| | cluster | |
| 1340 | Tailocin gene | MIC-70076, MIC-73019, MIC-73547 |
| | cluster | |
| 1341 | Tailocin gene | MIC-70076, MIC-73019, MIC-73547 |
| | cluster | |
| 1342 | Tailocin gene | MIC-70076, MIC-73019, MIC-73547 |
| | cluster | |
| 1343 | Tailocin gene | MIC-70076, MIC-73019, MIC-73547 |
| | cluster | |
| 1344 | Tailocin gene | MIC-70076, MIC-73019, MIC-73547 |
| | cluster | |
| 1345 | Tailocin gene | MIC-70076, MIC-73019, MIC-73547 |
| | cluster | |
| 1346 | Tailocin gene | MIC-70076, MIC-73019, MIC-73547 |
| | cluster | |
| 1347 | Tailocin gene | MIC-70076, MIC-73019, MIC-73547 |
| | cluster | |
| 1348 | Tailocin gene | MIC-70076, MIC-73019, MIC-73547 |
| | cluster | |
| 1349 | Tailocin gene | MIC-70076, MIC-73019, MIC-73547 |
| | cluster | |
| 1350 | Tailocin gene | MIC-70076, MIC-73019, MIC-73547 |
| | cluster | |
| 1351 | Tailocin gene | MIC-70076, MIC-73019, MIC-73547, |
| | cluster | MIC-14970, MIC-11290 |
| 1352 | Tailocin gene | MIC-70076, MIC-73019, MIC-38993, |
| | cluster | MIC-73547 |
| 1353 | Tailocin gene | MIC-70076, MIC-73019, MIC-94458, |
| | cluster | MIC-30352, MIC-82867, MIC-73547 |
| 1354 | Tailocin gene | MIC-70076, MIC-73019, MIC-73547 |
| | cluster | |
| 1355 | Tailocin gene | MIC-70076, MIC-73019, MIC-73547 |
| | cluster | |
| 1356 | Tailocin gene | MIC-70076, MIC-73019, MIC-73547 |
| | cluster | |
| 1357 | Tailocin gene | MIC-70076, MIC-73019, MIC-73547 |
| | cluster | |
| 1358 | Tailocin gene | MIC-70076, MIC-73019, MIC-73547 |
| | cluster | |
| 1359 | Tailocin gene | MIC-70076, MIC-73019, MIC-73547 |
| | cluster | |
| 1360 | Tailocin gene | MIC-70076, MIC-73019, MIC-73547 |
| | cluster | |
| 1361 | Tailocin gene | MIC-70076, MIC-73019, MIC-73547 |
| | cluster | |
| 1362 | Tailocin gene | MIC-70076, MIC-73019, MIC-73547 |
| | cluster | |
| 1363 | Tailocin gene | MIC-70076, MIC-73019, MIC-73547 |
| | cluster | |
| 1364 | Tailocin gene | MIC-70076, MIC-73019, MIC-73547 |
| | cluster | |
| 1365 | Tailocin gene | MIC-70076, MIC-73019, MIC-73547 |
| | cluster | |
| 1366 | Tailocin gene | MIC-70076, MIC-73019, MIC-73547 |
| | cluster | |
| 1367 | Tailocin gene | MIC-70076, MIC-73019, MIC-73547 |
| | cluster | |
| 1368 | Tailocin gene | MIC-70076, MIC-73019, MIC-73547 |
| | cluster | |
| 1369 | Tailocin gene | MIC-70076, MIC-73019, MIC-73547 |
| | cluster | |
| 1370 | Tailocin gene | MIC-70076, MIC-73019, MIC-73547 |
| | cluster | |
| 1371 | Tailocin gene | MIC-70076, MIC-73019, MIC-73547 |
| | cluster | |
| 1372 | Tailocin gene | MIC-70076, MIC-73019, MIC-73547 |
| | cluster | |
| 1373 | Tailocin gene | MIC-70076, MIC-73019, MIC-73547 |
| | cluster | |
| 1374 | Tailocin gene | MIC-82330, MIC-61954, MIC-29662, |
| | cluster | MIC-36254 |
| 1375 | Tailocin gene | MIC-68901, MIC-19814 |
| | cluster | |
| 1376 | Tailocin gene | MIC-68901, MIC-19814 |
| | cluster | |
| 1377 | Tailocin gene | MIC-68901, MIC-19814 |
| | cluster | |
| 1378 | Tailocin gene | MIC-68901, MIC-19814 |
| | cluster | |
| 1379 | Tailocin gene | MIC-68901, MIC-19814 |
| | cluster | |
| 1380 | Tailocin gene | MIC-68901, MIC-19814 |
| | cluster | |
| 1381 | Tailocin gene | MIC-68901, MIC-19814 |
| | cluster | |
| 1382 | Tailocin gene | MIC-68901, MIC-19814 |
| | cluster | |
| 1383 | Tailocin gene | MIC-68901, MIC-19814 |
| | cluster | |
| 1384 | Tailocin gene | MIC-68901, MIC-19814 |
| | cluster | |
| 1385 | Tailocin gene | MIC-68901, MIC-19814 |
| | cluster | |
| 1386 | Tailocin gene | MIC-68901, MIC-19814 |
| | cluster | |
| 1387 | Tailocin gene | MIC-68901, MIC-19814, MIC-87894, |
| | cluster | MIC-29285 |
| 1388 | Tailocin gene | MIC-87588, MIC-86605, MIC-54642, |
| | cluster | MIC-24837, MIC-55579, MIC-84492, |
| | | MIC-85267 |
| 1389 | Tailocin gene | MIC-87588, MIC-54642, MIC-90405 |
| | cluster | |
| 1390 | Tailocin gene | MIC-83010, MIC-87198, MIC-94458, |
| | | MIC-46385, MIC-62164, MIC-30352, |
| | cluster | MIC-82867, MIC-14970, MIC-11290, |
| | | MIC-87084 |
| 1391 | Tailocin gene | MIC-68901, MIC-19814 |
| | cluster | |
| 1392 | Tailocin gene | MIC-68901, MIC-19814 |
| | cluster | |
| 1393 | Tailocin gene | MIC-68901, MIC-19814 |
| | cluster | |
| 1394 | Tailocin gene | MIC-68901, MIC-19814 |
| | cluster | |
| 1395 | Tailocin gene | MIC-68901, MIC-19814 |
| | cluster | |
| 1396 | Tailocin gene | MIC-68901, MIC-19814 |
| | cluster | |
| 1397 | Tailocin gene | MIC-68901, MIC-19814 |
| | cluster | |
| 1398 | Tailocin gene | MIC-68901, MIC-19814 |
| | cluster | |
| 1399 | Tailocin gene | MIC-87588, MIC-86605, MIC-54642, |
| | cluster | MIC-24837, MIC-55579, MIC-94458, |
| | | MIC-30352, MIC-82867 |
| 1400 | Tailocin gene | MIC-24837, MIC-55579, MIC-90405 |
| | cluster | |
| 1401 | Tailocin gene | MIC-24837, MIC-55579, MIC-90405 |
| | cluster | |
| 1402 | Tailocin gene | MIC-68901 |
| | cluster | |
| 1403 | Tailocin gene | MIC-68901 |
| | cluster | |
| 1404 | Tailocin gene | MIC-68901 |
| | cluster | |
| 1405 | Tailocin gene | MIC-52924 |
| | cluster | |
| 1406 | Tailocin gene | MIC-52924 |
| | cluster | |
| 1407 | Tailocin gene | MIC-68901 |
| | cluster | |
| 1408 | Tailocin gene | MIC-52924 |
| | cluster | |
| 1409 | Tailocin gene | MIC-52924 |
| | cluster | |
| 1410 | Tailocin gene | MIC-83010, MIC-86605, MIC-81265, |
| | cluster | MIC-88834, MIC-84492, MIC-75437, |
| | | MIC-20446, MIC-94135, MIC-46385, |
| | | MIC-62164, MIC-87084, MIC-36497, |
| | | MIC-82689 |
| 1411 | Tailocin gene | MIC-83010, MIC-81265, MIC-88834, |
| | cluster | MIC-84492, MIC-75437, MIC-20446, |
| | | MIC-94135, MIC-46385, MIC-62164, |
| | | MIC-87084, MIC-36497, MIC-82689 |
| 1412 | Tailocin gene | MIC-81265, MIC-88834 |
| | cluster | |
| 1413 | Tailocin gene | MIC-81265, MIC-88834, MIC-84492, |
| | cluster | MIC-75437, MIC-20446 |
| 1414 | Tailocin gene | MIC-86605, MIC-81265, MIC-88834, |
| | cluster | MIC-84492, MIC-75437, MIC-20446, |
| | | MIC-94135, MIC-36497 |
| 1415 | Tailocin gene | MIC-86605, MIC-81265, MIC-88834, |
| | cluster | MIC-84492, MIC-75437, MIC-20446, |
| | | MIC-94135, MIC-36497, MIC-82689 |
| 1416 | Tailocin gene | MIC-86605, MIC-81265, MIC-88834, |
| | cluster | MIC-84492, MIC-75437, MIC-20446, |
| | | MIC-94135, MIC-36497, MIC-82689 |
| 1417 | Tailocin gene | MIC-83740, MIC-61954, MIC-29662 |
| | cluster | |
| 1418 | Tailocin gene | MIC-61954, MIC-29662 |
| | cluster | |
| 1419 | Tailocin gene | MIC-61954, MIC-29662 |
| | cluster | |
| 1420 | Tailocin gene | MIC-61954, MIC-29662 |
| | cluster | |
| 1421 | Tailocin gene | MIC-61954, MIC-29662 |
| | cluster | |
| 1422 | Tailocin gene | MIC-61954, MIC-29662 |
| | cluster | |
| 1423 | Tailocin gene | MIC-61954, MIC-29662 |
| | cluster | |
| 1424 | Tailocin gene | MIC-61954, MIC-29662 |
| | cluster | |
| 1425 | Tailocin gene | MIC-61954, MIC-29662 |
| | cluster | |
| 1426 | Tailocin gene | MIC-82330 |
| | cluster | |
| 1427 | Tailocin gene | MIC-68773 |
| | cluster | |
| 1428 | Tailocin gene | MIC-68773 |
| | cluster | |
| 1429 | Tailocin gene | MIC-68773 |
| | cluster | |
| 1430 | Tailocin gene | MIC-68773 |
| | cluster | |
| 1431 | Tailocin gene | MIC-68773 |
| | cluster | |
| 1432 | Tailocin gene | MIC-68773 |
| | cluster | |
| 1433 | Tailocin gene | MIC-68773 |
| | cluster | |
| 1434 | Tailocin gene | MIC-54778 |
| | cluster | |
| 1435 | Tailocin gene | MIC-19814 |
| | cluster | |
| 1436 | Tailocin gene | MIC-19814 |
| | cluster | |
| 1437 | Tailocin gene | MIC-19814 |
| | cluster | |
| 1438 | Tailocin gene | MIC-19814 |
| | cluster | |
| 1439 | Tailocin gene | MIC-19814 |
| | cluster | |
| 1440 | Tailocin gene | MIC-19814 |
| | cluster | |
| 1441 | Tailocin gene | MIC-19814 |
| | cluster | |
| 1442 | Tailocin gene | MIC-19814 |
| | cluster | |
| 1443 | Tailocin gene | MIC-87198 |
| | cluster | |
| 1444 | Tailocin gene | MIC-87198 |
| | cluster | |
| 1445 | Tailocin gene | MIC-87198 |
| | cluster | |
| 1446 | Tailocin gene | MIC-87198 |
| | cluster | |
| 1447 | Tailocin gene | MIC-87198 |
| | cluster | |
| 1448 | Tailocin gene | MIC-87198 |
| | cluster | |
| 1449 | Tailocin gene | MIC-90405 |
| | cluster | |
| 1450 | Tailocin gene | MIC-90405 |
| | cluster | |
| 1451 | Tailocin gene | MIC-90405 |
| | cluster | |
| 1452 | Tailocin gene | MIC-90405 |
| | cluster | |
| 1453 | Tailocin gene | MIC-90405 |
| | cluster | |
| 1454 | Tailocin gene | MIC-90405 |
| | cluster | |
| 1455 | Tailocin gene | MIC-90405 |
| | cluster | |
| 1456 | Tailocin gene | MIC-90405 |
| | cluster | |
| 1457 | Tailocin gene | MIC-90405 |
| | cluster | |
| 1458 | Tailocin gene | MIC-90405 |
| | cluster | |
| 1459 | Tailocin gene | MIC-90405 |
| | cluster | |
| 1460 | Tailocin gene | MIC-87894 |
| | cluster | |
| 1461 | Tailocin gene | MIC-87894 |
| | cluster | |
| 1462 | Tailocin gene | MIC-87894 |
| | cluster | |
| 1463 | Tailocin gene | MIC-87894 |
| | cluster | |
| 1464 | Tailocin gene | MIC-87894 |
| | cluster | |
| 1465 | Tailocin gene | MIC-87894 |
| | cluster | |
| 1466 | Tailocin gene | MIC-87894 |
| | cluster | |
| 1467 | Tailocin gene | MIC-87894 |
| | cluster | |
| 1468 | Tailocin gene | MIC-87894 |
| | cluster | |
| 1469 | Tailocin gene | MIC-87894 |
| | cluster | |
| 1470 | Tailocin gene | MIC-87894 |
| | cluster | |
| 1471 | Tailocin gene | MIC-68901 |
| | cluster | |
| 1472 | Tailocin gene | MIC-14439 |
| | cluster | |
| 1473 | Tailocin gene | MIC-14439 |
| | cluster | |
| 1474 | Tailocin gene | MIC-14439 |
| | cluster | |
| 1475 | Tailocin gene | MIC-14439 |
| | cluster | |
| 1476 | Tailocin gene | MIC-14439 |
| | cluster | |
| 1477 | Tailocin gene | MIC-14439 |
| | cluster | |
| 1478 | Tailocin gene | MIC-68901 |
| | cluster | |
| 1479 | Tailocin gene | MIC-14439 |
| | cluster | |
| 1480 | Tailocin gene | MIC-14439 |
| | cluster | |
| 1481 | Tailocin gene | MIC-14439 |
| | cluster | |
| 1482 | Tailocin gene | MIC-14439 |
| | cluster | |
| 1483 | Tailocin gene | MIC-14439 |
| | cluster | |
| 1484 | Tailocin gene | MIC-87588, MIC-86605, MIC-54642 |
| | cluster | |
| 1485 | Tailocin gene | MIC-87588, MIC-86605, MIC-54642 |
| | cluster | |
| 1486 | Tailocin gene | MIC-87588, MIC-86605, MIC-54642 |
| | cluster | |
| 1487 | Tailocin gene | MIC-87588, MIC-86605, MIC-54642 |
| | cluster | |
| 1488 | Tailocin gene | MIC-87588, MIC-86605, MIC-54642 |
| | cluster | |
| 1489 | Tailocin gene | MIC-87588, MIC-86605, MIC-54642 |
| | cluster | |
| 1490 | Tailocin gene | MIC-87588, MIC-86605, MIC-54642 |
| | cluster | |
| 1491 | Tailocin gene | MIC-87588, MIC-86605, MIC-54642 |
| | cluster | |
| 1492 | Tailocin gene | MIC-87588, MIC-86605, MIC-54642 |
| | cluster | |
| 1493 | Tailocin gene | MIC-87588, MIC-86605, MIC-54642 |
| | cluster | |
| 1494 | Tailocin gene | MIC-87588, MIC-86605, MIC-54642 |
| | cluster | |
| 1495 | Tailocin gene | MIC-87588, MIC-86605, MIC-54642 |
| | cluster | |
| 1496 | Tailocin gene | MIC-87588, MIC-86605, MIC-54642 |
| | cluster | |
| 1497 | Tailocin gene | MIC-87588, MIC-86605, MIC-54642 |
| | cluster | |
| 1498 | Tailocin gene | MIC-87588, MIC-86605, MIC-54642, |
| | cluster | MIC-84492 |
| 1499 | Tailocin gene | MIC-87588, MIC-86605, MIC-54642, |
| | cluster | MIC-84492 |
| 1500 | Tailocin gene | MIC-87588, MIC-86605, MIC-54642, |
| | cluster | MIC-84492 |
| 1501 | Tailocin gene | MIC-87588, MIC-86605, MIC-54642, |
| | cluster | MIC-84492 |
| 1502 | Tailocin gene | MIC-87588, MIC-86605, MIC-54642, |
| | cluster | MIC-84492 |
| 1503 | Tailocin gene | MIC-87588, MIC-86605, MIC-54642, |
| | cluster | MIC-84492 |
| 1504 | Tailocin gene | MIC-87588, MIC-86605, MIC-54642, |
| | cluster | MIC-84492 |
| 1505 | Tailocin gene | MIC-87588, MIC-86605, MIC-54642, |
| | cluster | MIC-84492 |
| 1506 | Tailocin gene | MIC-87588, MIC-86605, MIC-54642, |
| | cluster | MIC-84492 |
| 1507 | Tailocin gene | MIC-87588, MIC-86605, MIC-54642, |
| | cluster | MIC-29285 |
| 1508 | Tailocin gene | MIC-87588, MIC-54642 |
| | cluster | |
| 1509 | Tailocin gene | MIC-86605, MIC-94504, MIC-75437, |
| | cluster | MIC-14439, MIC-20446, MIC-94135, |
| | | MIC-87084, MIC-36497, MIC-82689 |
| 1510 | Tailocin gene | MIC-79613 |
| | cluster | |
| 1511 | Tailocin gene | MIC-79613 |
| | cluster | |
| 1512 | Tailocin gene | MIC-79613 |
| | cluster | |
| 1513 | Tailocin gene | MIC-79613 |
| | cluster | |
| 1514 | Tailocin gene | MIC-79613 |
| | cluster | |
| 1515 | Tailocin gene | MIC-79613 |
| | cluster | |
| 1516 | Tailocin gene | MIC-79613, MIC-53518 |
| | cluster | |
| 1517 | Tailocin gene | MIC-79613, MIC-53518 |
| | cluster | |
| 1518 | Tailocin gene | MIC-79613, MIC-53518 |
| | cluster | |
| 1519 | Tailocin gene | MIC-79613, MIC-53518 |
| | cluster | |
| 1520 | Tailocin gene | MIC-79613, MIC-53518 |
| | cluster | |
| 1521 | Tailocin gene | MIC-79613, MIC-53518 |
| | cluster | |
| 1522 | Tailocin gene | MIC-79613, MIC-53518 |
| | cluster | |
| 1523 | Tailocin gene | MIC-79613, MIC-53518 |
| | cluster | |
| 1524 | Tailocin gene | MIC-79613, MIC-53518 |
| | cluster | |
| 1525 | Tailocin gene | MIC-79613, MIC-53518 |
| | cluster | |
| 1526 | Tailocin gene | MIC-79613, MIC-53518 |
| | cluster | |
| 1527 | Tailocin gene | MIC-79613, MIC-53518 |
| | cluster | |
| 1528 | Tailocin gene | MIC-79613, MIC-53518 |
| | cluster | |
| 1529 | Tailocin gene | MIC-79613, MIC-53518 |
| | cluster | |
| 1530 | Tailocin gene | MIC-79613, MIC-53518 |
| | cluster | |
| 1531 | Tailocin gene | MIC-79613, MIC-53518 |
| | cluster | |
| 1532 | Tailocin gene | MIC-79613, MIC-53518 |
| | cluster | |
| 1533 | Tailocin gene | MIC-79613, MIC-53518 |
| | cluster | |
| 1534 | Tailocin gene | MIC-79613, MIC-53518 |
| | cluster | |
| 1535 | Tailocin gene | MIC-79613, MIC-53518 |
| | cluster | |
| 1536 | Tailocin gene | MIC-79613, MIC-53518 |
| | cluster | |
| 1537 | Tailocin gene | MIC-79613, MIC-53518 |
| | cluster | |
| 1538 | Tailocin gene | MIC-79613, MIC-53518 |
| | cluster | |
| 1539 | Tailocin gene | MIC-79613, MIC-53518 |
| | cluster | |
| 1540 | Tailocin gene | MIC-79613, MIC-53518 |
| | cluster | |
| 1541 | Tailocin gene | MIC-79613, MIC-53518 |
| | cluster | |
| 1542 | Tailocin gene | MIC-79613, MIC-53518 |
| | cluster | |
| 1543 | Tailocin gene | MIC-79613, MIC-53518 |
| | cluster | |
| 1544 | Tailocin gene | MIC-79613, MIC-53518 |
| | cluster | |
| 1545 | Tailocin gene | MIC-79613, MIC-53518, MIC-38993 |
| | cluster | |
| 1546 | Tailocin gene | MIC-79613, MIC-53518, MIC-38993 |
| | cluster | |
| 1547 | Tailocin gene | MIC-79613, MIC-53518, MIC-29285 |
| | cluster | |
| 1548 | Tailocin gene | MIC-53518 |
| | cluster | |
| 1549 | Tailocin gene | MIC-53518 |
| | cluster | |
| 1550 | Tailocin gene | MIC-53518 |
| | cluster | |
| 1551 | Tailocin gene | MIC-53518 |
| | cluster | |
| 1552 | Tailocin gene | MIC-53518 |
| | cluster | |
| 1553 | Tailocin gene | MIC-53518 |
| | cluster | |
| 1554 | Tailocin gene | MIC-53518 |
| | cluster | |
| 1555 | Tailocin gene | MIC-83010, MIC-46385, MIC-62164 |
| | cluster | |
| 1556 | Tailocin gene | MIC-83010, MIC-46385, MIC-62164, |
| | cluster | MIC-87084 |
| 1557 | Tailocin gene | MIC-83010, MIC-46385, MIC-62164, |
| | cluster | MIC-87084 |
| 1558 | Tailocin gene | MIC-68773 |
| | cluster | |
| 1559 | Tailocin gene | MIC-83740 |
| | cluster | |
| 1560 | Tailocin gene | MIC-83740 |
| | cluster | |
| 1561 | Tailocin gene | MIC-83740 |
| | cluster | |
| 1562 | Tailocin gene | MIC-83740 |
| | cluster | |
| 1563 | Tailocin gene | MIC-83740 |
| | cluster | |
| 1564 | Tailocin gene | MIC-83740 |
| | cluster | |
| 1565 | Tailocin gene | MIC-83740 |
| | cluster | |
| 1566 | Tailocin gene | MIC-83740 |
| | cluster | |
| 1567 | Tailocin gene | MIC-83740 |
| | cluster | |
| 1568 | Tailocin gene | MIC-83740 |
| | cluster | |
| 1569 | Tailocin gene | MIC-83740 |
| | cluster | |
| 1570 | Tailocin gene | MIC-80455 |
| | cluster | |
| 1571 | Tailocin gene | MIC-80455 |
| | cluster | |
| 1572 | Tailocin gene | MIC-80455 |
| | cluster | |
| 1573 | Tailocin gene | MIC-80455 |
| | cluster | |
| 1574 | Tailocin gene | MIC-80455 |
| | cluster | |
| 1575 | Tailocin gene | MIC-80455 |
| | cluster | |
| 1576 | Tailocin gene | MIC-80455 |
| | cluster | |
| 1577 | Tailocin gene | MIC-80455 |
| | cluster | |
| 1578 | Tailocin gene | MIC-80455 |
| | cluster | |
| 1579 | Tailocin gene | MIC-80455, MIC-85267 |
| | cluster | |
| 1580 | Tailocin gene | MIC-87588, MIC-86605, MIC-54642 |
| | cluster | |
| 1581 | Tailocin gene | MIC-87588, MIC-86605, MIC-54642 |
| | cluster | |
| 1582 | Tailocin gene | MIC-87588, MIC-86605, MIC-54642 |
| | cluster | |
| 1583 | Tailocin gene | MIC-87588, MIC-86605, MIC-54642 |
| | cluster | |
| 1584 | Tailocin gene | MIC-87588, MIC-86605, MIC-54642 |
| | cluster | |
| 1585 | Tailocin gene | MIC-87588, MIC-86605, MIC-54642 |
| | cluster | |
| 1586 | Tailocin gene | MIC-87588, MIC-86605, MIC-54642 |
| | cluster | |
| 1587 | Tailocin gene | MIC-87588, MIC-86605, MIC-54642 |
| | cluster | |
| 1588 | Tailocin gene | MIC-87588, MIC-86605, MIC-54642 |
| | cluster | |
| 1589 | Tailocin gene | MIC-87588, MIC-86605, MIC-54642 |
| | cluster | |
| 1590 | Tailocin gene | MIC-87588, MIC-86605, MIC-54642 |
| | cluster | |
| 1591 | Tailocin gene | MIC-87588, MIC-86605, MIC-54642 |
| | cluster | |
| 1592 | Tailocin gene | MIC-87588, MIC-86605, MIC-54642 |
| | cluster | |
| 1593 | Tailocin gene | MIC-87588, MIC-86605, MIC-54642, |
| | cluster | MIC-84492 |
| 1594 | Tailocin gene | MIC-87588, MIC-86605, MIC-54642, |
| | cluster | MIC-85267 |
| 1595 | Tailocin gene | MIC-86605 |
| | cluster | |
| 1596 | Tailocin gene | MIC-86605 |
| | cluster | |
| 1597 | Tailocin gene | MIC-86605, MIC-94135, MIC-36497, |
| | cluster | MIC-82689 |
| 1598 | Tailocin gene | MIC-94504 |
| | cluster | |
| 1599 | Tailocin gene | MIC-94504 |
| | cluster | |
| 1600 | Tailocin gene | MIC-24837, MIC-55579 |
| | cluster | |
| 1601 | Tailocin gene | MIC-24837, MIC-55579 |
| | cluster | |
| 1602 | Tailocin gene | MIC-24837, MIC-55579 |
| | cluster | |
| 1603 | Tailocin gene | MIC-24837, MIC-55579 |
| | cluster | |
| 1604 | Tailocin gene | MIC-24837, MIC-55579 |
| | cluster | |
| 1605 | Tailocin gene | MIC-24837, MIC-55579 |
| | cluster | |
| 1606 | Tailocin gene | MIC-24837, MIC-55579 |
| | cluster | |
| 1607 | Tailocin gene | MIC-24837, MIC-55579 |
| | cluster | |
| 1608 | Tailocin gene | MIC-24837, MIC-55579 |
| | cluster | |
| 1609 | Tailocin gene | MIC-24837, MIC-55579 |
| | cluster | |
| 1610 | Tailocin gene | MIC-24837, MIC-55579 |
| | cluster | |
| 1611 | Tailocin gene | MIC-24837, MIC-55579 |
| | cluster | |
| 1612 | Tailocin gene | MIC-24837, MIC-55579 |
| | cluster | |
| 1613 | Tailocin gene | MIC-24837, MIC-55579 |
| | cluster | |
| 1614 | Tailocin gene | MIC-24837, MIC-55579 |
| | cluster | |
| 1615 | Tailocin gene | MIC-24837, MIC-55579 |
| | cluster | |
| 1616 | Tailocin gene | MIC-24837, MIC-55579 |
| | cluster | |
| 1617 | Tailocin gene | MIC-24837, MIC-55579 |
| | cluster | |
| 1618 | Tailocin gene | MIC-24837, MIC-55579 |
| | cluster | |
| 1619 | Tailocin gene | MIC-24837, MIC-55579 |
| | cluster | |
| 1620 | Tailocin gene | MIC-24837, MIC-55579 |
| | cluster | |
| 1621 | Tailocin gene | MIC-24837, MIC-55579 |
| | cluster | |
| 1622 | Tailocin gene | MIC-24837, MIC-55579 |
| | cluster | |
| 1623 | Tailocin gene | MIC-24837, MIC-55579 |
| | cluster | |
| 1624 | Tailocin gene | MIC-24837, MIC-55579 |
| | cluster | |
| 1625 | Tailocin gene | MIC-24837, MIC-55579 |
| | cluster | |
| 1626 | Tailocin gene | MIC-24837, MIC-55579 |
| | cluster | |
| 1627 | Tailocin gene | MIC-24837, MIC-55579 |
| | cluster | |
| 1628 | Tailocin gene | MIC-24837, MIC-55579 |
| | cluster | |
| 1629 | Tailocin gene | MIC-24837, MIC-55579 |
| | cluster | |
| 1630 | Tailocin gene | MIC-24837, MIC-55579 |
| | cluster | |
| 1631 | Tailocin gene | MIC-24837, MIC-55579, MIC-84492, |
| | cluster | MIC-50391, MIC-69701, MIC-82689 |
| 1632 | Tailocin gene | MIC-24837, MIC-55579, MIC-85267 |
| | cluster | |
| 1633 | Tailocin gene | MIC-24837, MIC-55579, MIC-85267 |
| | cluster | |
| 1634 | Tailocin gene | MIC-24837, MIC-55579, MIC-85267 |
| | cluster | |
| 1635 | Tailocin gene | MIC-24837, MIC-55579, MIC-85267, |
| | cluster | MIC-29285 |
| 1636 | Tailocin gene | MIC-55579 |
| | cluster | |
| 1637 | Tailocin gene | MIC-87198, MIC-94458, MIC-30352, |
| | cluster | MIC-82867 |
| 1638 | Tailocin gene | MIC-19845 |
| | cluster | |
| 1639 | Tailocin gene | MIC-19845 |
| | cluster | |
| 1640 | Tailocin gene | MIC-19845 |
| | cluster | |
| 1641 | Tailocin gene | MIC-19845 |
| | cluster | |
| 1642 | Tailocin gene | MIC-19845 |
| | cluster | |
| 1643 | Tailocin gene | MIC-19845 |
| | cluster | |
| 1644 | Tailocin gene | MIC-19845 |
| | cluster | |
| 1645 | Tailocin gene | MIC-19845 |
| | cluster | |
| 1646 | Tailocin gene | MIC-19845 |
| | cluster | |
| 1647 | Tailocin gene | MIC-19845 |
| | cluster | |
| 1648 | Tailocin gene | MIC-19845 |
| | cluster | |
| 1649 | Tailocin gene | MIC-84492 |
| | cluster | |
| 1650 | Tailocin gene | MIC-84492 |
| | cluster | |
| 1651 | Tailocin gene | MIC-84492 |
| | cluster | |
| 1652 | Tailocin gene | MIC-84492 |
| | cluster | |
| 1653 | Tailocin gene | MIC-84492 |
| | cluster | |
| 1654 | Tailocin gene | MIC-84492 |
| | cluster | |
| 1655 | Tailocin gene | MIC-84492 |
| | cluster | |
| 1656 | Tailocin gene | MIC-84492 |
| | cluster | |
| 1657 | Tailocin gene | MIC-84492 |
| | cluster | |
| 1658 | Tailocin gene | MIC-84492 |
| | cluster | |
| 1659 | Tailocin gene | MIC-84492 |
| | cluster | |
| 1660 | Tailocin gene | MIC-84492 |
| | cluster | |
| 1661 | Tailocin gene | MIC-84492 |
| | cluster | |
| 1662 | Tailocin gene | MIC-84492 |
| | cluster | |
| 1663 | Tailocin gene | MIC-84492 |
| | cluster | |
| 1664 | Tailocin gene | MIC-84492 |
| | cluster | |
| 1665 | Tailocin gene | MIC-84492 |
| | cluster | |
| 1666 | Tailocin gene | MIC-84492 |
| | cluster | |
| 1667 | Tailocin gene | MIC-84492 |
| | cluster | |
| 1668 | Tailocin gene | MIC-84492 |
| | cluster | |
| 1669 | Tailocin gene | MIC-84492, MIC-29285 |
| | cluster | |
| 1670 | Tailocin gene | MIC-50391, MIC-69701 |
| | cluster | |
| 1671 | Tailocin gene | MIC-50391, MIC-69701 |
| | cluster | |
| 1672 | Tailocin gene | MIC-50391, MIC-69701 |
| | cluster | |
| 1673 | Tailocin gene | MIC-50391, MIC-69701 |
| | cluster | |
| 1674 | Tailocin gene | MIC-50391, MIC-69701 |
| | cluster | |
| 1675 | Tailocin gene | MIC-50391, MIC-69701 |
| | cluster | |
| 1676 | Tailocin gene | MIC-50391, MIC-69701 |
| | cluster | |
| 1677 | Tailocin gene | MIC-50391, MIC-69701 |
| | cluster | |
| 1678 | Tailocin gene | MIC-50391, MIC-69701 |
| | cluster | |
| 1679 | Tailocin gene | MIC-50391, MIC-69701, MIC-29285 |
| | cluster | |
| 1680 | Tailocin gene | MIC-85267 |
| | cluster | |
| 1681 | Tailocin gene | MIC-85267 |
| | cluster | |
| 1682 | Tailocin gene | MIC-85267 |
| | cluster | |
| 1683 | Tailocin gene | MIC-85267 |
| | cluster | |
| 1684 | Tailocin gene | MIC-85267 |
| | cluster | |
| 1685 | Tailocin gene | MIC-85267 |
| | cluster | |
| 1686 | Tailocin gene | MIC-85267 |
| | cluster | |
| 1687 | Tailocin gene | MIC-85267 |
| | cluster | |
| 1688 | Tailocin gene | MIC-85267 |
| | cluster | |
| 1689 | Tailocin gene | MIC-85267 |
| | cluster | |
| 1690 | Tailocin gene | MIC-85267 |
| | cluster | |
| 1691 | Tailocin gene | MIC-85267 |
| | cluster | |
| 1692 | Tailocin gene | MIC-85267 |
| | cluster | |
| 1693 | Tailocin gene | MIC-85267 |
| | cluster | |
| 1694 | Tailocin gene | MIC-85267 |
| | cluster | |
| 1695 | Tailocin gene | MIC-85267 |
| | cluster | |
| 1696 | Tailocin gene | MIC-85267 |
| | cluster | |
| 1697 | Tailocin gene | MIC-85267 |
| | cluster | |
| 1698 | Tailocin gene | MIC-85267 |
| | cluster | |
| 1699 | Tailocin gene | MIC-85267 |
| | cluster | |
| 1700 | Tailocin gene | MIC-85267 |
| | cluster | |
| 1701 | Tailocin gene | MIC-85267 |
| | cluster | |
| 1702 | Tailocin gene | MIC-85267 |
| | cluster | |
| 1703 | Tailocin gene | MIC-85267 |
| | cluster | |
| 1704 | Tailocin gene | MIC-85267 |
| | cluster | |
| 1705 | Tailocin gene | MIC-85267 |
| | cluster | |
| 1706 | Tailocin gene | MIC-85267 |
| | cluster | |
| 1707 | Tailocin gene | MIC-85267 |
| | cluster | |
| 1708 | Tailocin gene | MIC-85267 |
| | cluster | |
| 1709 | Tailocin gene | MIC-85267 |
| | cluster | |
| 1710 | Tailocin gene | MIC-85267 |
| | cluster | |
| 1711 | Tailocin gene | MIC-85267 |
| | cluster | |
| 1712 | Tailocin gene | MIC-85267 |
| | cluster | |
| 1713 | Tailocin gene | MIC-85267 |
| | cluster | |
| 1714 | Tailocin gene | MIC-85267 |
| | cluster | |
| 1715 | Tailocin gene | MIC-85267 |
| | cluster | |
| 1716 | Tailocin gene | MIC-85267 |
| | cluster | |
| 1717 | Tailocin gene | MIC-85267, MIC-94458, MIC-30352, |
| | cluster | MIC-82867 |
| 1718 | Tailocin gene | MIC-75437, MIC-20446 |
| | cluster | |
| 1719 | Tailocin gene | MIC-75437, MIC-20446 |
| | cluster | |
| 1720 | Tailocin gene | MIC-75437, MIC-20446 |
| | cluster | |
| 1721 | Tailocin gene | MIC-75437, MIC-20446 |
| | cluster | |
| 1722 | Tailocin gene | MIC-75437, MIC-20446 |
| | cluster | |
| 1723 | Tailocin gene | MIC-75437, MIC-20446 |
| | cluster | |
| 1724 | Tailocin gene | MIC-75437, MIC-20446 |
| | cluster | |
| 1725 | Tailocin gene | MIC-75437, MIC-20446 |
| | cluster | |
| 1726 | Tailocin gene | MIC-75437, MIC-20446 |
| | cluster | |
| 1727 | Tailocin gene | MIC-75437, MIC-20446 |
| | cluster | |
| 1728 | Tailocin gene | MIC-75437, MIC-20446 |
| | cluster | |
| 1729 | Tailocin gene | MIC-75437, MIC-20446 |
| | cluster | |
| 1730 | Tailocin gene | MIC-75437, MIC-20446 |
| | cluster | |
| 1731 | Tailocin gene | MIC-38993 |
| | cluster | |
| 1732 | Tailocin gene | MIC-38993 |
| | cluster | |
| 1733 | Tailocin gene | MIC-38993 |
| | cluster | |
| 1734 | Tailocin gene | MIC-38993 |
| | cluster | |
| 1735 | Tailocin gene | MIC-38993 |
| | cluster | |
| 1736 | Tailocin gene | MIC-38993 |
| | cluster | |
| 1737 | Tailocin gene | MIC-38993 |
| | cluster | |
| 1738 | Tailocin gene | MIC-38993 |
| | cluster | |
| 1739 | Tailocin gene | MIC-38993 |
| | cluster | |
| 1740 | Tailocin gene | MIC-38993 |
| | cluster | |
| 1741 | Tailocin gene | MIC-38993 |
| | cluster | |
| 1742 | Tailocin gene | MIC-38993 |
| | cluster | |
| 1743 | Tailocin gene | MIC-38993 |
| | cluster | |
| 1744 | Tailocin gene | MIC-38993, MIC-94458, MIC-30352, |
| | cluster | MIC-82867, MIC-29285 |
| 1745 | Tailocin gene | MIC-38993, MIC-29285 |
| | cluster | |
| 1746 | Tailocin gene | MIC-94135 |
| | cluster | |
| 1747 | Tailocin gene | MIC-94135 |
| | cluster | |
| 1748 | Tailocin gene | MIC-94135 |
| | cluster | |
| 1749 | Tailocin gene | MIC-94135 |
| | cluster | |
| 1750 | Tailocin gene | MIC-94135 |
| | cluster | |
| 1751 | Tailocin gene | MIC-94135 |
| | cluster | |
| 1752 | Tailocin gene | MIC-94135 |
| | cluster | |
| 1753 | Tailocin gene | MIC-94135 |
| | cluster | |
| 1754 | Tailocin gene | MIC-94135 |
| | cluster | |
| 1755 | Tailocin gene | MIC-94135 |
| | cluster | |
| 1756 | Tailocin gene | MIC-94135 |
| | cluster | |
| 1757 | Tailocin gene | MIC-94458, MIC-30352, MIC-82867 |
| | cluster | |
| 1758 | Tailocin gene | MIC-94458, MIC-30352, MIC-82867 |
| | cluster | |
| 1759 | Tailocin gene | MIC-94458, MIC-30352, MIC-82867 |
| | cluster | |
| 1760 | Tailocin gene | MIC-94458, MIC-30352, MIC-82867 |
| | cluster | |
| 1761 | Tailocin gene | MIC-94458, MIC-30352, MIC-82867 |
| | cluster | |
| 1762 | Tailocin gene | MIC-94458, MIC-30352, MIC-82867 |
| | cluster | |
| 1763 | Tailocin gene | MIC-94458, MIC-30352, MIC-82867 |
| | cluster | |
| 1764 | Tailocin gene | MIC-94458, MIC-30352, MIC-82867 |
| | cluster | |
| 1765 | Tailocin gene | MIC-94458, MIC-30352, MIC-82867 |
| | cluster | |
| 1766 | Tailocin gene | MIC-94458, MIC-30352, MIC-82867 |
| | cluster | |
| 1767 | Tailocin gene | MIC-94458, MIC-30352, MIC-82867 |
| | cluster | |
| 1768 | Tailocin gene | MIC-94458, MIC-30352, MIC-82867 |
| | cluster | |
| 1769 | Tailocin gene | MIC-94458, MIC-30352, MIC-82867 |
| | cluster | |
| 1770 | Tailocin gene | MIC-94458, MIC-30352, MIC-82867 |
| | cluster | |
| 1771 | Tailocin gene | MIC-94458, MIC-30352, MIC-82867 |
| | cluster | |
| 1772 | Tailocin gene | MIC-94458, MIC-30352, MIC-82867 |
| | cluster | |
| 1773 | Tailocin gene | MIC-94458, MIC-30352, MIC-82867 |
| | cluster | |
| 1774 | Tailocin gene | MIC-94458, MIC-30352, MIC-82867 |
| | cluster | |
| 1775 | Tailocin gene | MIC-94458, MIC-30352, MIC-82867 |
| | cluster | |
| 1776 | Tailocin gene | MIC-94458, MIC-30352, MIC-82867 |
| | cluster | |
| 1777 | Tailocin gene | MIC-94458, MIC-30352, MIC-82867 |
| | cluster | |
| 1778 | Tailocin gene | MIC-94458, MIC-30352, MIC-82867 |
| | cluster | |
| 1779 | Tailocin gene | MIC-94458, MIC-30352, MIC-82867 |
| | cluster | |
| 1780 | Tailocin gene | MIC-94458, MIC-30352, MIC-82867 |
| | cluster | |
| 1781 | Tailocin gene | MIC-94458, MIC-30352, MIC-82867 |
| | cluster | |
| 1782 | Tailocin gene | MIC-94458, MIC-30352, MIC-82867 |
| | cluster | |
| 1783 | Tailocin gene | MIC-94458, MIC-30352, MIC-82867 |
| | cluster | |
| 1784 | Tailocin gene | MIC-94458, MIC-30352, MIC-82867 |
| | cluster | |
| 1785 | Tailocin gene | MIC-94458, MIC-30352, MIC-82867 |
| | cluster | |
| 1786 | Tailocin gene | MIC-94458, MIC-30352, MIC-82867 |
| | cluster | |
| 1787 | Tailocin gene | MIC-94458, MIC-30352, MIC-82867 |
| | cluster | |
| 1788 | Tailocin gene | MIC-94458, MIC-30352, MIC-82867 |
| | cluster | |
| 1789 | Tailocin gene | MIC-94458, MIC-30352, MIC-82867 |
| | cluster | |
| 1790 | Tailocin gene | MIC-94458, MIC-30352, MIC-82867 |
| | cluster | |
| 1791 | Tailocin gene | MIC-94458, MIC-30352, MIC-82867 |
| | cluster | |
| 1792 | Tailocin gene | MIC-94458, MIC-30352, MIC-82867 |
| | cluster | |
| 1793 | Tailocin gene | MIC-94458, MIC-30352, MIC-82867 |
| | cluster | |
| 1794 | Tailocin gene | MIC-94458, MIC-30352, MIC-82867 |
| | cluster | |
| 1795 | Tailocin gene | MIC-46385, MIC-62164 |
| | cluster | |
| 1796 | Tailocin gene | MIC-46385, MIC-62164 |
| | cluster | |
| 1797 | Tailocin gene | MIC-46385, MIC-62164 |
| | cluster | |
| 1798 | Tailocin gene | MIC-46385, MIC-62164 |
| | cluster | |
| 1799 | Tailocin gene | MIC-46385, MIC-62164 |
| | cluster | |
| 1800 | Tailocin gene | MIC-46385, MIC-62164 |
| | cluster | |
| 1801 | Tailocin gene | MIC-46385, MIC-62164 |
| | cluster | |
| 1802 | Tailocin gene | MIC-46385, MIC-62164 |
| | cluster | |
| 1803 | Tailocin gene | MIC-46385, MIC-62164, MIC-36497 |
| | cluster | |
| 1804 | Tailocin gene | MIC-36254 |
| | cluster | |
| 1805 | Tailocin gene | MIC-36254 |
| | cluster | |
| 1806 | Tailocin gene | MIC-36254 |
| | cluster | |
| 1807 | Tailocin gene | MIC-36254 |
| | cluster | |
| 1808 | Tailocin gene | MIC-36254 |
| | cluster | |
| 1809 | Tailocin gene | MIC-14970, MIC-11290 |
| | cluster | |
| 1810 | Tailocin gene | MIC-14970, MIC-11290 |
| | cluster | |
| 1811 | Tailocin gene | MIC-14970, MIC-11290 |
| | cluster | |
| 1812 | Tailocin gene | MIC-14970, MIC-11290 |
| | cluster | |
| 1813 | Tailocin gene | MIC-14970, MIC-11290 |
| | cluster | |
| 1814 | Tailocin gene | MIC-14970, MIC-11290 |
| | cluster | |
| 1815 | Tailocin gene | MIC-14970, MIC-11290 |
| | cluster | |
| 1816 | Tailocin gene | MIC-14970, MIC-11290 |
| | cluster | |
| 1817 | Tailocin gene | MIC-14970, MIC-11290 |
| | cluster | |
| 1818 | Tailocin gene | MIC-14970, MIC-11290 |
| | cluster | |
| 1819 | Tailocin gene | MIC-14970, MIC-11290 |
| | cluster | |
| 1820 | Tailocin gene | MIC-14970, MIC-11290 |
| | cluster | |
| 1821 | Tailocin gene | MIC-14970, MIC-11290 |
| | cluster | |
| 1822 | Tailocin gene | MIC-14970, MIC-11290 |
| | cluster | |
| 1823 | Tailocin gene | MIC-14970, MIC-11290 |
| | cluster | |
| 1824 | Tailocin gene | MIC-14970, MIC-11290 |
| | cluster | |
| 1825 | Tailocin gene | MIC-14970, MIC-11290 |
| | cluster | |
| 1826 | Tailocin gene | MIC-14970, MIC-11290 |
| | cluster | |
| 1827 | Tailocin gene | MIC-14970, MIC-11290 |
| | cluster | |
| 1828 | Tailocin gene | MIC-14970, MIC-11290 |
| | cluster | |
| 1829 | Tailocin gene | MIC-87084 |
| | cluster | |
| 1830 | Tailocin gene | MIC-87084 |
| | cluster | |
| 1831 | Tailocin gene | MIC-87084 |
| | cluster | |
| 1832 | Tailocin gene | MIC-87084 |
| | cluster | |
| 1833 | Tailocin gene | MIC-87084 |
| | cluster | |
| 1834 | Tailocin gene | MIC-87084 |
| | cluster | |
| 1835 | Tailocin gene | MIC-87084 |
| | cluster | |
| 1836 | Tailocin gene | MIC-36497 |
| | cluster | |
| 1837 | Tailocin gene | MIC-36497 |
| | cluster | |
| 1838 | Tailocin gene | MIC-36497 |
| | cluster | |
| 1839 | Tailocin gene | MIC-36497 |
| | cluster | |
| 1840 | Tailocin gene | MIC-36497 |
| | cluster | |
| 1841 | Tailocin gene | MIC-36497 |
| | cluster | |
| 1842 | Tailocin gene | MIC-36497 |
| | cluster | |
| 1843 | Tailocin gene | MIC-36497 |
| | cluster | |
| 1844 | Tailocin gene | MIC-36497 |
| | cluster | |
| 1845 | Tailocin gene | MIC-36497 |
| | cluster | |
| 1846 | Tailocin gene | MIC-36497 |
| | cluster | |
| 1847 | Tailocin gene | MIC-36497 |
| | cluster | |
| 1848 | Tailocin gene | MIC-36497 |
| | cluster | |
| 1849 | Tailocin gene | MIC-36497 |
| | cluster | |
| 1850 | Tailocin gene | MIC-36497 |
| | cluster | |
| 1851 | Tailocin gene | MIC-36497 |
| | cluster | |
| 1852 | Tailocin gene | MIC-36497 |
| | cluster | |
| 1853 | Tailocin gene | MIC-36497 |
| | cluster | |
| 1854 | Tailocin gene | MIC-29285 |
| | cluster | |
| 1855 | Tailocin gene | MIC-29285 |
| | cluster | |
| 1856 | Tailocin gene | MIC-29285 |
| | cluster | |
| 1857 | Tailocin gene | MIC-29285 |
| | cluster | |
| 1858 | Tailocin gene | MIC-29285 |
| | cluster | |
| 1859 | Tailocin gene | MIC-29285 |
| | cluster | |
| 1860 | Tailocin gene | MIC-29285 |
| | cluster | |
| 1861 | Tailocin gene | MIC-29285 |
| | cluster | |
| 1862 | Tailocin gene | MIC-29285 |
| | cluster | |
| 1863 | Tailocin gene | MIC-29285 |
| | cluster | |
| 1864 | Tailocin gene | MIC-29285 |
| | cluster | |
| 1865 | Tailocin gene | MIC-29285 |
| | cluster | |
| 1866 | Tailocin gene | MIC-29285 |
| | cluster | |
| 1867 | Tailocin gene | MIC-29285 |
| | cluster | |
| 1868 | Tailocin gene | MIC-29285 |
| | cluster | |
| 1869 | Tailocin gene | MIC-29285 |
| | cluster | |
| 1870 | Tailocin gene | MIC-29285 |
| | cluster | |
| 1871 | Tailocin gene | MIC-29285 |
| | cluster | |
| 1872 | Tailocin gene | MIC-29285 |
| | cluster | |
| 1873 | Tailocin gene | MIC-29285 |
| | cluster | |
| 1874 | Tailocin gene | MIC-29285 |
| | cluster | |
| 1875 | Tailocin gene | MIC-29285 |
| | cluster | |
| 1876 | Tailocin gene | MIC-29285 |
| | cluster | |
| 1877 | Tailocin gene | MIC-29285 |
| | cluster | |
| 1878 | Tailocin gene | MIC-29285 |
| | cluster | |
| 1879 | Tailocin gene | MIC-29285 |
| | cluster | |
| 1880 | Tailocin gene | MIC-29285 |
| | cluster | |
| 1881 | Tailocin gene | MIC-29285 |
| | cluster | |
| 1882 | Tailocin gene | MIC-29285 |
| | cluster | |
| 1883 | Tailocin gene | MIC-29285 |
| | cluster | |
| 1884 | Tailocin gene | MIC-29285 |
| | cluster | |
| 1885 | Tailocin gene | MIC-29285 |
| | cluster | |
| 1886 | Tailocin gene | MIC-29285 |
| | cluster | |
| 1887 | Tailocin gene | MIC-29285 |
| | cluster | |
| 1888 | Tailocin gene | MIC-29285 |
| | cluster | |
| 1889 | Tailocin gene | MIC-29285 |
| | cluster | |
| 1890 | Tailocin gene | MIC-29285 |
| | cluster | |
| 1891 | Tailocin gene | MIC-29285 |
| | cluster | |
| 1892 | Tailocin gene | MIC-29285 |
| | cluster | |
| 1893 | Tailocin gene | MIC-29285 |
| | cluster | |
| 1894 | Tailocin gene | MIC-29285 |
| | cluster | |
| 1895 | Tailocin gene | MIC-29285 |
| | cluster | |
| 1896 | Tailocin gene | MIC-29285 |
| | cluster | |
| 1897 | Tailocin gene | MIC-29285 |
| | cluster | |
| 1898 | Tailocin gene | MIC-29285 |
| | cluster | |
| 1899 | Tailocin gene | MIC-29285 |
| | cluster | |
| 1900 | Tailocin gene | MIC-29285 |
| | cluster | |
| 1901 | Tailocin gene | MIC-29285 |
| | cluster | |
| 1902 | Tailocin gene | MIC-29285 |
| | cluster | |
| 1903 | Tailocin gene | MIC-29285 |
| | cluster | |
| 1904 | Tailocin gene | MIC-29285 |
| | cluster | |
| 1905 | Tailocin gene | MIC-29285 |
| | cluster | |
| 1906 | Tailocin gene | MIC-29285 |
| | cluster | |
| 1907 | Tailocin gene | MIC-29285 |
| | cluster | |
| 1908 | Tailocin gene | MIC-29285 |
| | cluster | |
| 1909 | Tailocin gene | MIC-29285 |
| | cluster | |
| 1910 | Tailocin gene | MIC-29285 |
| | cluster | |
| 1911 | Tailocin gene | MIC-82689 |
| | cluster | |
| 1912 | Tailocin gene | MIC-82689 |
| | cluster | |
| 1913 | Tailocin gene | MIC-82689 |
| | cluster | |
| 1914 | Tailocin gene | MIC-82689 |
| | cluster | |
| 1915 | Tailocin gene | MIC-82689 |
| | cluster | |
| 1916 | Tailocin gene | MIC-82689 |
| | cluster | |
| 1917 | Tailocin gene | MIC-82689 |
| | cluster | |
| 1918 | Tailocin gene | MIC-82689 |
| | cluster | |
| 1919 | Tailocin gene | MIC-82689 |
| | cluster | |
| 1920 | Tailocin gene | MIC-82689 |
| | cluster | |
| 1921 | Tailocin gene | MIC-82689 |
| | cluster | |
| 1922 | Tailocin gene | MIC-82689 |
| | cluster | |
| 1923 | Type VI | MIC-80455, MIC-87588, MIC-86605, |
| | secretion | MIC-54642, MIC-94504, MIC-24837, |
| | system | MIC-55579, MIC-61954, MIC-29662, |
| | | MIC-50391, MIC-69701, MIC-90405, |
| | | MIC-38993, MIC-46385, MIC-62164, |
| | | MIC-87894, MIC-52924, MIC-14970, |
| | | MIC-11290, MIC-36497 |
| 1924 | Type VI | MIC-87588, MIC-86605, MIC-54642, |
| | secretion | MIC-24837, MIC-55579, MIC-61954, |
| | system | MIC-29662, MIC-90405, MIC-36497, |
| | | MIC-82689 |
| 1925 | Type VI | MIC-87588, MIC-86605, MIC-54642, |
| | secretion | MIC-61954, MIC-29662 |
| | system | |
| 1926 | Type VI | MIC-87588, MIC-86605, MIC-54642, |
| | secretion | MIC-61954, MIC-29662, MIC-50391, |
| | system | MIC-69701, MIC-90405, MIC-38993, |
| | | MIC-46385, MIC-62164, MIC-87894, |
| | | MIC-52924, MIC-36497 |
| 1927 | Type VI | MIC-70076, MIC-73019, MIC-73547 |
| | secretion | |
| | system | |
| 1928 | Type VI | MIC-70076, MIC-73019, MIC-73547 |
| | secretion | |
| | system | |
| 1929 | Type VI | MIC-70076, MIC-73019, MIC-73547 |
| | secretion | |
| | system | |
| 1930 | Type VI | MIC-70076, MIC-73019, MIC-73547 |
| | secretion | |
| | system | |
| 1931 | Type VI | MIC-68901, MIC-19814 |
| | secretion | |
| | system | |
| 1932 | Type VI | MIC-68773, MIC-14970, MIC-11290 |
| | secretion | |
| | system | |
| 1933 | Type VI | MIC-54778, MIC-14439, MIC-94458, |
| | secretion | MIC-30352, MIC-82867 |
| | system | |
| 1934 | Type VI | MIC-54778, MIC-14439, MIC-94458, |
| | secretion | MIC-30352, MIC-82867 |
| | system | |
| 1935 | Type VI | MIC-81265, MIC-88834 |
| | secretion | |
| | system | |
| 1936 | Type VI | MIC-68773 |
| | secretion | |
| | system | |
| 1937 | Type VI | MIC-68773 |
| | secretion | |
| | system | |
| 1938 | Type VI | MIC-68773, MIC-36497 |
| | secretion | |
| | system | |
| 1939 | Type VI | MIC-54778 |
| | secretion | |
| | system | |
| 1940 | Type VI | MIC-54778 |
| | secretion | |
| | system | |
| 1941 | Type VI | MIC-87198 |
| | secretion | |
| | system | |
| 1942 | Type VI | MIC-87198 |
| | secretion | |
| | system | |
| 1943 | Type VI | MIC-87198 |
| | secretion | |
| | system | |
| 1944 | Type VI | MIC-87198 |
| | secretion | |
| | system | |
| 1945 | Type VI | MIC-90405 |
| | secretion | |
| | system | |
| 1946 | Type VI | MIC-14439 |
| | secretion | |
| | system | |
| 1947 | Type VI | MIC-14439 |
| | secretion | |
| | system | |
| 1948 | Type VI | MIC-79613, MIC-53518 |
| | secretion | |
| | system | |
| 1949 | Type VI | MIC-83010 |
| | secretion | |
| | system | |
| 1950 | Type VI | MIC-83740 |
| | secretion | |
| | system | |
| 1951 | Type VI | MIC-80455 |
| | secretion | |
| | system | |
| 1952 | Type VI | MIC-80455 |
| | secretion | |
| | system | |
| 1953 | Type VI | MIC-80455 |
| | secretion | |
| | system | |
| 1954 | Type VI | MIC-94504 |
| | secretion | |
| | system | |
| 1955 | Type VI | MIC-94504 |
| | secretion | |
| | system | |
| 1956 | Type VI | MIC-94504 |
| | secretion | |
| | system | |
| 1957 | Type VI | MIC-24837, MIC-55579 |
| | secretion | |
| | system | |
| 1958 | Type VI | MIC-24837, MIC-55579 |
| | secretion | |
| | system | |
| 1959 | Type VI | MIC-19845 |
| | secretion | |
| | system | |
| 1960 | Type VI | MIC-84492 |
| | secretion | |
| | system | |
| 1961 | Type VI | MIC-84492 |
| | secretion | |
| | system | |
| 1962 | Type VI | MIC-84492 |
| | secretion | |
| | system | |
| 1963 | Type VI | MIC-50391, MIC-69701, MIC-52924 |
| | secretion | |
| | system | |
| 1964 | Type VI | MIC-50391, MIC-69701, MIC-52924 |
| | secretion | |
| | system | |
| 1965 | Type VI | MIC-85267 |
| | secretion | |
| | system | |
| 1966 | Type VI | MIC-75437, MIC-20446 |
| | secretion | |
| | system | |
| 1967 | Type VI | MIC-38993 |
| | secretion | |
| | system | |
| 1968 | Type VI | MIC-38993 |
| | secretion | |
| | system | |
| 1969 | Type VI | MIC-94135 |
| | secretion | |
| | system | |
| 1970 | Type VI | MIC-94458, MIC-30352, MIC-82867 |
| | secretion | |
| | system | |
| 1971 | Type VI | MIC-94458, MIC-30352, MIC-82867 |
| | secretion | |
| | system | |
| 1972 | Type VI | MIC-46385, MIC-62164, MIC-87894 |
| | secretion | |
| | system | |
| 1973 | Type VI | MIC-46385, MIC-62164, MIC-87894 |
| | secretion | |
| | system | |
| 1974 | Type VI | MIC-36254 |
| | secretion | |
| | system | |
| 1975 | Type VI | MIC-14970, MIC-11290 |
| | secretion | |
| | system | |
| 1976 | Type VI | MIC-14970, MIC-11290 |
| | secretion | |
| | system | |
| 1977 | Type VI | MIC-87084 |
| | secretion | |
| | system | |
| 1978 | Type VI | MIC-29285 |
| | secretion | |
| | system | |
| 1979 | Type VI | MIC-82689 |
| | secretion | |
| | system | |
| 1980 | Type VI | MIC-82689 |
| | secretion | |
| | system | |
| 1981 | Type VI | MIC-82689 |
| | secretion | |
| | system | |
| 1982 | Type VI | MIC-87588, MIC-86605, MIC-54642, |
| | secretion | MIC-61954, MIC-29662 |
| | system | |
| | putative | |
| | effector | |
| 1983 | Type VI | MIC-87588, MIC-86605, MIC-54642, |
| | secretion | MIC-61954, MIC-29662 |
| | system | |
| | putative | |
| | effector | |
| 1984 | Type VI | MIC-87588, MIC-86605, MIC-54642, |
| | secretion | MIC-61954, MIC-29662, MIC-90405 |
| | system | |
| | putative | |
| | effector | |
| 1985 | Type VI | MIC-70076, MIC-73019, MIC-54778, |
| | secretion | MIC-73547 |
| | system | |
| | putative | |
| | effector | |
| 1986 | Type VI | MIC-70076, MIC-73019, MIC-73547 |
| | secretion | |
| | system | |
| | putative | |
| | effector | |
| 1987 | Type VI | MIC-70076, MIC-73019, MIC-73547 |
| | secretion | |
| | system | |
| | putative | |
| | effector | |
| 1988 | Type VI | MIC-70076, MIC-73019, MIC-73547 |
| | secretion | |
| | system | |
| | putative | |
| | effector | |
| 1989 | Type VI | MIC-70076, MIC-73019, MIC-73547 |
| | secretion | |
| | system | |
| | putative | |
| | effector | |
| 1990 | Type VI | MIC-52924 |
| | secretion | |
| | system | |
| | putative | |
| | effector | |
| 1991 | Type VI | MIC-61954, MIC-29662 |
| | secretion | |
| | system | |
| | putative | |
| | effector | |
| 1992 | Type VI | MIC-68773 |
| | secretion | |
| | system | |
| | putative | |
| | effector | |
| 1993 | Type VI | MIC-68773 |
| | secretion | |
| | system | |
| | putative | |
| | effector | |
| 1994 | Type VI | MIC-68773 |
| | secretion | |
| | system | |
| | putative | |
| | effector | |
| 1995 | Type VI | MIC-68773 |
| | secretion | |
| | system | |
| | putative | |
| | effector | |
| 1996 | Type VI | MIC-54778 |
| | secretion | |
| | system | |
| | putative | |
| | effector | |
| 1997 | Type VI | MIC-54778 |
| | secretion | |
| | system | |
| | putative | |
| | effector | |
| 1998 | Type VI | MIC-54778 |
| | secretion | |
| | system | |
| | putative | |
| | effector | |
| 1999 | Type VI | MIC-87198 |
| | secretion | |
| | system | |
| | putative | |
| | effector | |
| 2000 | Type VI | MIC-87198 |
| | secretion | |
| | system | |
| | putative | |
| | effector | |
| 2001 | Type VI | MIC-87198 |
| | secretion | |
| | system | |
| | putative | |
| | effector | |
| 2002 | Type VI | MIC-87198 |
| | secretion | |
| | system | |
| | putative | |
| | effector | |
| 2003 | Type VI | MIC-90405 |
| | secretion | |
| | system | |
| | putative | |
| | effector | |
| 2004 | Type VI | MIC-90405 |
| | secretion | |
| | system | |
| | putative | |
| | effector | |
| 2005 | Type VI | MIC-14439 |
| | secretion | |
| | system | |
| | putative | |
| | effector | |
| 2006 | Type VI | MIC-14439 |
| | secretion | |
| | system | |
| | putative | |
| | effector | |
| 2007 | Type VI | MIC-80455 |
| | secretion | |
| | system | |
| | putative | |
| | effector | |
| 2008 | Type VI | MIC-80455 |
| | secretion | |
| | system | |
| | putative | |
| | effector | |
| 2009 | Type VI | MIC-80455 |
| | secretion | |
| | system | |
| | putative | |
| | effector | |
| 2010 | Type VI | MIC-80455 |
| | secretion | |
| | system | |
| | putative | |
| | effector | |
| 2011 | Type VI | MIC-87588, MIC-86605, MIC-54642 |
| | secretion | |
| | system | |
| | putative | |
| | effector | |
| 2012 | Type VI | MIC-94504 |
| | secretion | |
| | system | |
| | putative | |
| | effector | |
| 2013 | Type VI | MIC-94504 |
| | secretion | |
| | system | |
| | putative | |
| | effector | |
| 2014 | Type VI | MIC-94504 |
| | secretion | |
| | system | |
| | putative | |
| | effector | |
| 2015 | Type VI | MIC-94504, MIC-90405 |
| | secretion | |
| | system | |
| | putative | |
| | effector | |
| 2016 | Type VI | MIC-24837, MIC-55579 |
| | secretion | |
| | system | |
| | putative | |
| | effector | |
| 2017 | Type VI | MIC-24837, MIC-55579 |
| | secretion | |
| | system | |
| | putative | |
| | effector | |
| 2018 | Type VI | MIC-24837, MIC-55579 |
| | secretion | |
| | system | |
| | putative | |
| | effector | |
| 2019 | Type VI | MIC-24837, MIC-55579 |
| | secretion | |
| | system | |
| | putative | |
| | effector | |
| 2020 | Type VI | MIC-84492 |
| | secretion | |
| | system | |
| | putative | |
| | effector | |
| 2021 | Type VI | MIC-50391, MIC-69701 |
| | secretion | |
| | system | |
| | putative | |
| | effector | |
| 2022 | Type VI | MIC-50391, MIC-69701, MIC-52924 |
| | secretion | |
| | system | |
| | putative | |
| | effector | |
| 2023 | Type VI | MIC-50391, MIC-69701, MIC-52924 |
| | secretion | |
| | system | |
| | putative | |
| | effector | |
| 2024 | Type VI | MIC-50391, MIC-69701, MIC-52924 |
| | secretion | |
| | system | |
| | putative | |
| | effector | |
| 2025 | Type VI | MIC-75437, MIC-20446 |
| | secretion | |
| | system | |
| | putative | |
| | effector | |
| 2026 | Type VI | MIC-14439, MIC-94458, MIC-30352, |
| | secretion | MIC-82867 |
| | system | |
| | putative | |
| | effector | |
| 2027 | Type VI | MIC-14439, MIC-94458, MIC-30352, |
| | secretion | MIC-82867 |
| | system | |
| | putative | |
| | effector | |
| 2028 | Type VI | MIC-38993 |
| | secretion | |
| | system | |
| | putative | |
| | effector | |
| 2029 | Type VI | MIC-38993 |
| | secretion | |
| | system | |
| | putative | |
| | effector | |
| 2030 | Type VI | MIC-38993 |
| | secretion | |
| | system | |
| | putative | |
| | effector | |
| 2031 | Type VI | MIC-38993 |
| | secretion | |
| | system | |
| | putative | |
| | effector | |
| 2032 | Type VI | MIC-94458, MIC-30352, MIC-82867 |
| | secretion | |
| | system | |
| | putative | |
| | effector | |
| 2033 | Type VI | MIC-94458, MIC-30352, MIC-82867 |
| | secretion | |
| | system | |
| | putative | |
| | effector | |
| 2034 | Type VI | MIC-94458, MIC-30352, MIC-82867 |
| | secretion | |
| | system | |
| | putative | |
| | effector | |
| 2035 | Type VI | MIC-46385, MIC-62164 |
| | secretion | |
| | system | |
| | putative | |
| | effector | |
| 2036 | Type VI | MIC-46385, MIC-62164, MIC-87894 |
| | secretion | |
| | system | |
| | putative | |
| | effector | |
| 2037 | Type VI | MIC-46385, MIC-62164, MIC-87894 |
| | secretion | |
| | system | |
| | putative | |
| | effector | |
| 2038 | Type VI | MIC-46385, MIC-62164, MIC-87894 |
| | secretion | |
| | system | |
| | putative | |
| | effector | |
| 2039 | Type VI | MIC-46385, MIC-62164, MIC-87894 |
| | secretion | |
| | system | |
| | putative | |
| | effector | |
| 2040 | Type VI | MIC-14970, MIC-11290 |
| | secretion | |
| | system | |
| | putative | |
| | effector | |
| 2041 | Type VI | MIC-14970, MIC-11290 |
| | secretion | |
| | system | |
| | putative | |
| | effector | |
| 2042 | Type VI | MIC-14970, MIC-11290 |
| | secretion | |
| | system | |
| | putative | |
| | effector | |
| 2043 | Type VI | MIC-14970, MIC-11290 |
| | secretion | |
| | system | |
| | putative | |
| | effector | |
| 2044 | Type VI | MIC-36497 |
| | secretion | |
| | system | |
| | putative | |
| | effector | |
| 2045 | Type VI | MIC-36497 |
| | secretion | |
| | system | |
| | putative | |
| | effector | |
| 2046 | Type VI | MIC-36497 |
| | secretion | |
| | system | |
| | putative | |
| | effector | |
| 2047 | Type VI | MIC-36497 |
| | secretion | |
| | system | |
| | putative | |
| | effector | |
| 2048 | Type VI | MIC-82689 |
| | secretion | |
| | system | |
| | putative | |
| | effector | |
| 2049 | Type VI | MIC-82689 |
| | secretion | |
| | system | |
| | putative | |
| | effector | |
| 2050 | Type VI | MIC-82689 |
| | secretion | |
| | system | |
| | putative | |
| | effector | |
| 2051 | Type VI | MIC-82689 |
| | secretion | |
| | system | |
| | putative | |
| | effector | |

### Example 3. Assessment of Improved Plant Characteristics: Vigor Assay

### Assay of Soy Seedling Vigor

[0135] Seed preparation: The lot quality of soybean seeds is first assessed by testing germination of 100 seeds. Seeds are placed, 8 seeds per petri dish, on filter paper in petri dishes, 12 ml of water is added to each plate and plates are incubated for 3 days at 24° C. The process should be repeated with a fresh seed lot if fewer than 95% of the seeds have germinated. One thousand soybean seeds are then surface sterilized by co-incubation with chlorine gas in a 20×30 cm container placed in a chemical fume hood for 16 hours. Percent germination of 50 seeds, per sterilization batch, is tested as above and confirmed to be greater than 95%.

[0136] Preparation of endophyte treatments: Spore solutions are made by rinsing and scraping spores from agar slants which have been growing for about 1 month. Rinsing is done with 0.05% Silwet. Solutions are passed through Miracloth to filter out mycelia. Spores per ml are counted under a microscope using a hemocytometer. The stock suspension is then diluted into 10\hat{ }6 spores/ml utilizing water. 3 μl of spore suspension is used per soy seed (˜10\hat{ }3 CFUs/seed is obtained). Control treatments are prepared by adding equivalent volumes of sterile water to seeds.

[0137] Assay of seedling vigor: Two rolled pieces of germination paper are placed in a sterile glass gar with 50 ml sterile water, then removed when completely saturated. Then the papers are separated, and inoculated seeds are placed at approximately 1 cm intervals along the length of one sheet of moistened germination paper, at least 2.5 cm from the top of the paper and 3.8 cm from the edge of the paper. The second sheet of is placed on top of the soy seeds and the layered papers and seeds are loosely rolled into a tube. Each tube is secured with a rubber band around the middle and placed in a single sterile glass jar and covered loosely with a lid. For each treatment, three jars with 15 seeds per jar are prepared. The position of jars within the growth chamber is randomized. Jars are incubated at 60% relative humidity, and 22° C. day, 18° C. night with 12 hours light and 12 hours dark for 4 days and then the lids are removed, and the jars incubated for an additional 7 days. Then the germinated soy seedlings are weighed and photographed, and root length and root surface area are measured.

[0138] Dirt, excess water, seed coats and other debris is removed from seedlings to allow accurate scanning of the roots. Individual seedlings are laid out on clear plastic trays and trays are arranged on an Epson Expression 11000XL scanner (Epson America, Inc., Long Beach CA). Roots are manually arranged to reduce the amount of overlap. For root measurements, shoots are removed if the shape of the shoot causes it to overlap the roots.

[0139] The WinRHIZO software version Arabidopsis Pro2016a (Regents Instruments, Quebec Canada) is used with the following acquisition settings: greyscale 4000 dpi image, speed priority, overlapping (1 object), Root Morphology: Precision (standard), Crossing Detection (normal). The scanning area is set to the maximum scanner area. When the scan is completed, the root area is selected, and root length and root surface area are measured.

[0140] Statistical analysis is performed using R (R Core Team, 2016. R: A language and environment for statistical computing. R Foundation for Statistical Computing, Vienna, Austria. R-project.org/) or a similar statistical software program.

### Assay of Rice Seedling Vigor

[0141] Seed preparation: The lot of rice seeds is first evaluated for germination by transfer of 100 seeds and with 8 ml of water to a filter paper lined petri dish. Seeds are incubated for 3 days at 24° C. The process should be repeated with a fresh seed lot if fewer than 95% of the seeds have germinated. Rice seeds are then surface sterilized by co-incubation with chlorine gas in a 20×30 cm container in a chemical fume hood for 12 hours. Percent germination of 50 seeds, per sterilization batch, is tested as above and confirmed to be greater than 95%.

[0142] Optional reagent preparation: 7.5% polyethylene glycol (PEG) is prepared by adding 75 g of PEG to 1000 ml of water, then stirring on a warm hot plate until the PEG is fully dissolved. The solution is then autoclaved.

[0143] Preparation of endophyte treatments: Spore solutions are made by rinsing and scraping spores from agar slants which have been growing for about 1 month. Rinsing was done with 0.05% Silwet. Solutions are passed through Miracloth to filter out mycelia. Spores per ml are counted under a microscope using a hemocytometer. The stock suspension is then diluted into 10\hat{ }6 spores/ml utilizing water. 3 μl of spore suspension is used per rice seed (˜10\hat{ }3 CFUs/seed was obtained). Seeds and spores are combined in a 50 ml falcon tube and gently shaken for 5-10 seconds until thoroughly coated. Control treatments are prepared by adding equivalent volumes of sterile water to seeds.

[0144] Assay of seedling vigor: Petri dishes are prepared by adding four sheets of sterile heavy weight seed germination paper, then adding either 50 ml of sterile water or, optionally, 50 ml of PEG solution as prepared above, to each plate then allowing the liquid to thoroughly soak into all sheets. The sheets are positioned and then creased so that the back of the plate and one side wall are covered, two sheets are then removed and placed on a sterile surface. Along the edge of the plate across from the covered side wall 15 inoculated rice seeds are placed evenly at least one inch from the top of the plate and half an inch from the sides. Seeds are placed smooth side up and with the pointed end of the seed pointing toward the side wall of the plate covered by germination paper. The seeds are then covered by the two reserved sheets, and the moist paper layers smoothed together to remove air bubbles and secure the seeds, and then the lid is replaced. For each treatment, at least three plates with 15 seeds per plate are prepared. The plates are then randomly distributed into stacks of 8-12 plates and a plate without seeds is placed on the top. The stacks are incubated at 60% relative humidity, and 22° C. day, 18° C. night with 12 hours light and 12 hours dark for 24 hours, then each plate is turned to a semi-vertical position with the side wall covered by paper at the bottom. The plates are incubated for an additional 5 days, then rice seeds are scored manually for germination, root and shoot length.

[0145] Statistical analysis is performed using R or a similar statistical software program.

### Assay of Corn Seedling Vigor

[0146] Seed preparation: The lot quality of corn seeds is first evaluated for germination by transfer of 100 seeds with 3.5 ml of water to a filter paper lined petri dish. Seeds are incubated for 3 days at 24° C. The process should be repeated with a fresh seed lot if fewer than 95% of the seeds have germinated. One thousand corn seeds are then surface sterilized by co-incubation with chlorine gas in a 20×30 cm container in a chemical fume hood for 12 hours. Percent germination of 50 seeds, per sterilization batch, is tested as above and confirmed to be greater than 95%.

[0147] Optional reagent preparation: 7.5% PEG 6000 (Calbiochem, San Diego, CA) is prepared by adding 75 g of PEG to 1000 ml of water, then stirred on a warm hot plate until the PEG is fully dissolved. The solution is then autoclaved.

[0148] Preparation of endophyte treatments: Spore solutions are made by rinsing and scraping spores from agar slants which have been growing for about 1 month. Rinsing is done with 0.05% Silwet. Solutions are passed through Miracloth to filter out mycelia. Spores per ml are counted under a microscope using a hemocytometer. The stock suspension is then diluted into 10\hat{ }6 spores/ml utilizing water. 3 μl of spore suspension is used per corn seed (˜10\hat{ }3 CFUs/seed is obtained). Control treatments are prepared by adding equivalent volumes of sterile water to seeds.

[0149] Assay of seedling vigor: Either 25 ml of sterile water or, optionally, 25 ml of PEG solution as prepared above, is added to each Cyg™ germination pouch (Mega International, Newport, MN) and place into pouch rack (Mega International, Newport, MN). Sterile forceps are used to place corn seeds prepared as above into every other perforation in the germination pouch. Seeds are fitted snugly into each perforation to ensure they do not shift when moving the pouches. Before and in between treatments forceps are sterilized using ethanol and flame and workspace wiped down with 70% ethanol. For each treatment, three pouches with 15 seeds per pouch are prepared. The germination racks with germination pouches are placed into plastic tubs and covered with perforated plastic wrap to prevent drying. Tubs are incubated at 60% relative humidity, and 22° C. day, 18° C. night with 12 hours light and 12 hours dark for 6 days to allow for germination and root length growth. Placement of pouches within racks and racks/tubs within the growth chamber is randomized to minimize positional effect. At the end of 6 days the corn seeds are scored manually for germination, root and shoot length.

[0150] Statistical analysis is performed using R or a similar statistical software program.

### Assay of Wheat Seedling Vigor

[0151] Seed preparation: The lot of wheat seeds is first evaluated for germination by transfer of 100 seeds and with 8 ml of water to a filter paper lined petri dish. Seeds are incubated for 3 days at 24° C. The process should be repeated with a fresh seed lot if fewer than 95% of the seeds have germinated. Wheat seeds are then surface sterilized by co-incubation with chlorine gas in a 20×30 cm container in a chemical fume hood for 12 hours. Percent germination of 50 seeds, per sterilization batch, is tested as above and confirmed to be greater than 95%.

[0152] Optional reagent preparation: 7.5% polyethylene glycol (PEG) is prepared by adding 75 g of PEG to 1000 ml of water, then stirring on a warm hot plate until the PEG is fully dissolved. The solution is then autoclaved.

[0153] Preparation of endophyte treatments: Spore solutions are made by rinsing and scraping spores from agar slants which have been growing for about 1 month. Rinsing is done with 0.05% Silwet. Solutions are passed through Miracloth to filter out mycelia. Spores per ml are counted under a microscope using a hemocytometer. The stock suspension is then diluted into 10\hat{ }6 spores/ml utilizing water. 3 μl of spore suspension is used per wheat seed (˜10\hat{ }3 CFUs/seed was obtained). Seeds and spores are combined in a 50 ml falcon tube and gently shaken for 5-10 seconds until thoroughly coated. Control treatments are prepared by adding equivalent volumes of sterile water to seeds.

[0154] Assay of seedling vigor: Petri dishes are prepared by adding four sheets of sterile heavy weight seed germination paper, then adding either 50 ml of sterile water or, optionally, 50 ml of PEG solution as prepared above, to each plate then allowing the liquid to thoroughly soak into all sheets. The sheets are positioned and then creased so that the back of the plate and one side wall are covered, two sheets are then removed and placed on a sterile surface. Along the edge of the plate across from the covered side wall 15 inoculated wheat seeds are placed evenly at least one inch from the top of the plate and half an inch from the sides. Seeds are placed smooth side up and with the pointed end of the seed pointing toward the side wall of the plate covered by germination paper. The seeds are then covered by the two reserved sheets, and the moist paper layers smoothed together to remove air bubbles and secure the seeds, and then the lid is replaced. For each treatment, at least three plates with 15 seeds per plate are prepared. The plates are then randomly distributed into stacks of 8-12 plates and a plate without seeds is placed on the top. The stacks are incubated at 60% relative humidity, and 22° C. day, 18° C. night with 12 hours light and 12 hours dark for 24 hours, then each plate is turned to a semi-vertical position with the side wall covered by paper at the bottom. The plates are incubated for an additional 5 days, then wheat seeds are scored manually for scored manually for germination, root and shoot length, root and shoot surface area, seedling mass, root and shoot and seedling length.

[0155] Statistical analysis is performed using R or a similar statistical software program.

### Example 3A. Assessment of Improved Traits of Agronomic Importance: Reduced Pathogen Growth

[0156] Petri dishes were prepared with sterile growth medium. Each plate was inoculated with a plug of pathogen placed in the center of the plate (for example see FIG. 1A, 104), and surrounded by four autoclaved wheat seeds treated with MIC-70076 or chemical fungicide or untreated controls (lacking formulation and the one or more heterologously disposed endophyte) as described in Example 4; MIC-70076 was applied to seeds at a rate of 0.65 mL/kg seed. Plates were incubated and pathogen growth monitored.

[0157] FIG. 1A, FIG. 1B, and FIG. 2 show exemplary images of plates inoculated with Dreschlera tritici-repentis. FIG. 1A shows an exemplary image of a plate inoculated with Dreschlera tritici-repentis and four autoclaved wheat seeds treated with MIC-70076 (0.65 ml/kg). FIG. 1A shows that a visible biofilm has formed around the treated seed (105), a halo of inhibition has formed around each seed, and the area of Dreschlera tritici-repentis growth on the plate is limited. FIG. 1B shows an exemplary image of a plate inoculated with Dreschlera tritici-repentis and four autoclaved wheat seeds treated with chemical fungicides Thiram and Carbendazim. FIG. 1B also shows the area of Dreschlera tritici-repentis growth on the plate is limited. FIG. 2 shows an exemplary image of a plate inoculated with Dreschlera tritici-repentis and four wheat seeds not treated with any endophyte or chemical fungicide.

[0158] FIG. 3A shows exemplary images of plates inoculated with Bipolaris sorokiniana. FIG. 3A shows an exemplary image of a plate inoculated with Bipolaris sorokiniana and autoclaved four wheat seeds treated with MIC-70076 (0.65 ml/kg). FIG. 3A shows that a halo of inhibition has formed around each seed, and the area of Bipolaris sorokiniana growth on the plate is limited. FIG. 3B shows an exemplary image of a plate inoculated with Bipolaris sorokiniana and four wheat seeds treated with chemical fungicides Thiram and Carbendazim. FIG. 3B also shows the area of Bipolaris sorokiniana is not significantly reduced relative to the untreated control in FIG. 4, the Thiram and Carbendazim treatment did not reduce the area of Bipolaris sorokiniana growth on the plate. FIG. 4 shows an exemplary image of a plate inoculated with Bipolaris sorokiniana and four autoclaved wheat seeds not treated with any endophyte or chemical fungicide.

[0159] FIG. 5 shows the average colony diameter (in mm) of plates inoculated with Bipolaris sorokiniana by days of incubation and seed treatment. Three seed treatments are shown, from left to right: results from plates containing seeds treated with 0.65 ml/kg MIC-70076, seeds treated with chemical fungicides Thiram and Carbendazim, and untreated seeds. For each of the three treatments, bars represent the diameter in millimeters of the Bipolaris sorokiniana colony, from left to right, after 2, 4, 6, and 8 days of incubation.

[0160] FIG. 6 shows the average colony diameter (in mm) of plates inoculated with Dreschlera tritici-repentis by days of incubation and seed treatment. Three seed treatments are shown, from left to right: results from plates containing seeds treated with 0.65 ml/kg MIC-70076, seeds treated with chemical fungicides Thiram and Carbendazim, and untreated seeds. For each of the three treatments, bars represent the diameter in millimeters of the Dreschlera tritici-repentis colony, from left to right, after 2, 4, 6, and 8 days of incubation.

### Example 4. Method of Preparation of Endophytes and Heterologous Disposition of Endophytes on Seeds for Greenhouse Trials

[0161] Seeds are heterologously disposed to each endophyte according to the following seed treatment protocol.

### Preparation of Seeds

[0162] Sieves are used to standardize the size of seeds used for greenhouse trials. The average weight of seeds is calculated by weighing 3 samples of 100 size selected seeds each and calculating the average weight of a seed. This value is used to calculate the target dose of endophyte per seed. The target dose is generally between 10\hat{ }2-10\hat{ }8 CFU per seed, in some cases at least 10\hat{ }3 CFU per seed, or at least 10\hat{ }5 CFU per seed.

### Preparation of Bacterial and Fungal Endophytes

[0163] An agar plug of each bacterial strain is transferred using a transfer tube to 4 ml of potato dextrose broth (PDB) in a 24 well plate and incubated at room temperature at 675 rpm on a shaker for 3 days. After growth of bacteria in broth, 200 μl is transferred into a spectrophotometer reading plate and bacteria OD is read at 600 nm absorbance. The total volume of inoculum needed to treat seeds with the desired dose is calculated. The target dose is generally between 10\hat{ }2-10\hat{ }8 CFU per seed, in some cases at least 10\hat{ }3 CFU per seed, or at least 10\hat{ }5 CFU per seed. The inoculum is diluted with sterile 1x PBS so that the total volume of inoculum per seed is about 2.5 microliters/seed for corn, about 1.5 microliters/seed for wheat and soy, and about 1.5 microliters/seed for cotton. Control treatments were prepared using equivalent volumes of sterile 1×PBS. The bacteria inoculum solution is applied to the prepared seeds and mixed well.

[0164] The thawed contents of a cryovial are plated on 100% MEA with 3% agar plates. The plates are sealed with Parafilm® and incubated in a growth chamber set at 60% relative humidity and 22 degrees C. with diurnal light settings (12:12 dark to light) for approximately 14 days.

[0165] Spore suspension buffer is prepared by mixing 1 ml 10% silwet with 250 ml 1×PBS and filter sterilizing. For each plate of fungi, 4-5 ml of the prepared sterile PBS is added and an L-shaped spreader used to vigorously scrape the spores, tilting the plate to allow the suspension to sink to the bottom of the plate. If additional plates of the fungal endophyte were prepared, an additional 2 ml of the prepared sterile PBS and the suspension from the prior plate of the SYM are added and the scraping procedure followed as above. The suspension is then pipetted onto a piece of sterile Miracloth over a sterile collection container. Spores per ml are counted under a microscope using a hemocytometer. The total spore suspension needed to treat the seeds with the desired dose is calculated. The target dose is generally between 10\hat{ }2-10\hat{ }8 CFU per seed, in some cases at least 10\hat{ }3 CFU per seed, or at least 10\hat{ }5 CFU per seed. The spore suspension is diluted with sterile 1x PBS so that the total volume of inoculum per seed is about 2.5 μl/seed for corn, about 1.5 μl/seed for wheat and soy, and about 1.5 μl/seed for cotton. Control treatments were prepared using equivalent volumes of sterile 1×PBS. The fungal inoculum solution is applied to the prepared seeds and mixed well.

### Example 5. Greenhouse Assessment of Improved Plant Characteristics Under Water Deficit

[0166] This example describes an exemplary method by which improved plant health of endophyte treated plants may be shown in a growth environment comprising a water deficit.

[0167] Greenhouse assay setup: This greenhouse assay is conducted in individual plastic pots, filled with moistened potting soil. This greenhouse assay is conducted using seeds (optionally, chemically treated) coated with one or more endophytes described herein and formulation control (lacking the one or more heterologously disposed endophytes) and untreated controls (lacking formulation and the one or more heterologously disposed endophyte) as described in Example 4. Seeds are placed onto each pot and lightly covered with potting mix. Replicated pots of each treatment are set up and placed on a greenhouse bench using a random block design. For example, 18 replicates are planted for each treatment and control. Plants are monitored daily for emergence and watered as necessary to maintain a moist but not saturated soil surface (for example, plants are watered with 125 ml Hoagland's solution (8 mM N) (Hoagland, D. R. and D. I. Arnon. 1950. The water culture method for growing plants without soil. California Agri. Exp. Sta. Cir. No. 347. University of California Berkeley Press, CA., pp: 347) per pot on every Monday, Wednesday and Friday).

[0168] The following growth and vigor metrics are measured for each treatment: percentage emergence at Day 4, 5, 7 (for soybean, winter wheat and cotton) or Day 3, 4, 5 (for corn), leaf count (the number of fully expanded leaves on the main stem) at Days 10, 17 and 24.

[0169] At Day 14 after planting, the potting mix in each pot is fully saturated (for example, 150 ml Hoagland's solution is added to each pot and the soil given time to fully absorb the solution, before an additional 150 ml Hoagland's solution). On subsequent days plants are observed and assigned a wilt score. Wilt scores range from 1-9 and are more fully described in the following table.

TABLE A
Description of phenotypes for each wilt scores

| Wilt | |
|---|---|
| score | Description of wilt phenotype |
| 9 | Normal no wilting - turgid green healthy |
| 8 | Leaves start losing turgor but are not soft yet no |
| | folding or rolling or change of leaf surface some small |
| | area of leaves becomes pale between the minor veins |
| 7 | Leaves further lose turgor become soft and pale at least |
| | one leaf starts slightly rolling |
| 6 | Leaves are further soft and pale all leaves are rolling |
| | except the center growing leaf |
| 5 | All leaves are very soft and pale with rolling - one leaf |
| | may be completely closed |
| 4 | Whole plant looks very bad - center leaves are very pale |
| | and rolling badly - all leaves may be completely |
| | closed - leaf sheath starts losing turgor |
| 3 | Leaf base is still fresh - leaf sheath loses turgor 2 |
| | lower leaves start drying |
| 2 | Center leaf starts drying - leaf base is not fresh |
| | anymore - all leaves are dried |
| 1 | For any plant that is worse than score 2 - the wilting |
| | score will be 1 |

[0170] Watering is withheld until 80% of plants have a wilt score of at least 4. Pots are then fully saturated and a normal watering schedule resumed. Additional vigor and growth metrics may be measured during recovery including shoot height, area of chlorosis, turgor pressure of leaves, number of live leaves, etc. After a recovery period, for example 1 week, plants are gently removed from pots, washed with tap water to remove dirt, and photographed. Optionally, plant tissue is collected for nutrient composition analysis. Plants are put into a paper bag and dried in an oven. Optionally, the plant is separated into shoot and root tissue prior to drying. The dry weight of each individual plant, or shoot or root thereof, is recorded.

### Example 6. Greenhouse Assessment of Improved Plant Characteristics Under Nitrogen Deficit

[0171] This example describes an exemplary method by which improved plant health of endophyte treated plants may be shown in a growth environment comprising a nitrogen deficit.

[0172] Greenhouse assay setup: This greenhouse assay is conducted in individual plastic pots, filled with moistened potting soil. This greenhouse assay is conducted using seeds (optionally, chemically treated) coated with one or more endophytes described herein and formulation control (lacking the one or more heterologously disposed endophytes) and untreated controls (lacking formulation and the one or more heterologously disposed endophyte) as described in Example 4. Seeds are placed onto each pot and lightly covered with potting mix. Replicated pots of each treatment are set up and placed on a greenhouse bench using a random block design. For example, 18 replicates are planted for each treatment and control. Nitrogen deficit is introduced by reducing the Nitrogen in the Hoagland's solution (3 mM N), which is used to water the plants. Plants are monitored daily for emergence and watered as necessary to maintain a moist but not saturated soil surface (for example, plants are watered with 125 ml Hoagland's solution (3 mM N) per pot on every Monday, Wednesday and Friday).

[0173] The following growth and vigor metrics are collected for each treatment: percentage emergence at Day 4, 5, 7 (for soybean, winter wheat and cotton) or Day 3, 4, 5 (for corn), leaf count (the number of fully expanded leaves on the main stem) at Days 10, 17 and 24.

[0174] Additional vigor and growth metrics may be collected including shoot height, leaf area, number of chlorotic leaves, chlorophyll content, number of live leaves, etc. At harvest plants are gently removed from pots, washed with tap water to remove dirt, and photographed. Plant tissue is collected for nutrient composition analysis. Plants are put into a paper bag and dried in an oven. Optionally, the plant is separated into shoot and root tissue prior to drying. The dry weight of each individual plant, or shoot or root thereof, is recorded.

### Example 7. Greenhouse Assessment of Improved Plant Characteristics Under Phosphorus Deficit

[0175] This example describes an exemplary method by which improved plant health of endophyte treated plants may be shown in a growth environment comprising a phosphorus deficit.

[0176] This greenhouse assay is conducted in individual plastic pots, filled with moistened potting soil. This greenhouse assay is conducted using seeds (optionally, chemically treated) coated with one or more endophytes described herein and formulation control (lacking the one or more heterologously disposed endophytes) and untreated controls (lacking formulation and the one or more heterologously disposed endophyte) as described in Example 4. Seeds are placed onto each pot and lightly covered with potting mix. Replicated pots of each treatment are set up and placed on a greenhouse bench using a random block design. For example, 16 replicates are planted for each treatment and control. Phosphorus deficit is introduced by removing Phosphorus from the Hoagland's solution (0 mM P), which is used to water the plants. Plants are monitored daily for emergence and watered as necessary to maintain a moist but not saturated soil surface (for example, plants are watered with 125 ml Hoagland's solution (0 mM P) per pot on every Monday, Wednesday and Friday).

[0177] The following growth and vigor metrics are collected for each treatment: percentage emergence at Day 4, 5, 7 (for soybean, winter wheat and cotton) or Day 3, 4, 5 (for corn), leaf count (the number of fully expanded leaves on the main stem) at Days 10, 17 and 24.

[0178] Additional vigor and growth metrics may be collected including shoot height, leaf area, coloration of leaves, number of live leaves, etc. At harvest plants are gently removed from pots, washed with tap water to remove dirt, and photographed. Plant tissue is collected for nutrient composition analysis. Plants are put into a paper bag and dried in an oven. Optionally, the plant is separated into shoot and root tissue prior to drying. The dry weight of each individual plant, or shoot or root thereof, is recorded.

### Example 8. Greenhouse Assessment of Improved Plant Health Under Biotic Stress

[0179] This example describes an exemplary method by which improved plant health of endophyte treated plants was shown in a growth environment comprising the crop pathogen Rhizoctonia solani or Pythium ultimum, causal agents of seedling damping off disease. This assay may utilize dicots or monocots, though results for soybean, cotton and wheat are described here.

[0180] Preparation of pathogen inoculum A stock of Rhizoctonia solani anastomosis group 4 and a stock of Pythium ultimum var. ultimum were each grown on a standard potato dextrose agar plate. Plugs of fresh mycelium were then transferred into standard potato dextrose broth. After sufficient growth was achieved, the cultures were poured though cheesecloth to capture the fungal biomass, which was subsequently rinsed with water. After removing excess rinse water, a roughly equivalent volume of water was added to the fungal biomass before blending to create slurries. The resulting slurries were further diluted to the required concentration necessary to observe desired level of symptoms.

[0181] Greenhouse assay setup The greenhouse assay was conducted in a commercial potting mix. A divot was placed in the center of a pot containing wetted soil using a standardized dibble. An appropriate volume of the relevant slurry was added to the center of each divot.

[0182] This greenhouse assay was conducted using seeds coated with one or more endophytes described herein and formulation control (lacking the one or more heterologously disposed endophytes) and untreated controls (lacking the one or more heterologously disposed endophyte) as described in Example 4. Concentration of endophyte treatment applied to seeds ranged from approximately 10\hat{ }2-10\hat{ }8 CFU/seed (1E6 cells/mL to 1E8 cells/mL). Seeds were placed onto each divot after addition of the relevant inoculum. The seeds were then covered with uninoculated soil and again watered. High soil moisture levels were maintained throughout the course of the experiment. Replicates were included in a randomized design to obtain sufficient statistical power for analysis. Plants were grown in a controlled environment until 7 days after planting, approximately 4 days post emergence of control plants. At this point fresh shoot weight was measured on a per plant basis.

TABLE 3
Greenhouse testing of endophytes in Rhizoctonia solani treated winter wheat, showing
% uplift (improvement) in shoot fresh weight in Rhizoctonia conditions relative to
untreated formulation controls. Each row represents an experimental trial, where each
trial contains 14 plants per treatment. Measurements were taken 7 days after planting.

| | | Average | Standard | | |
|---|---|---|---|---|---|
| | Average | Endophyte | Deviation | % Improvement | |
| | Formulation | Treatment | Endophyte | Treatment | Experiment Stress |
| MIC-ID | Control (g) | (g) | Treatment | vs. Control | Level |
| MIC-70076 | 0.058 | 0.089 | 0.016 | 52.22 | Moderate Stress |
| MIC-70076 | 0.052 | 0.043 | 0.012 | −16.17 | Moderate Stress |
| MIC-70076 | 0.077 | 0.056 | 0.011 | −27.24 | Moderate Stress |
| MIC-70076 | 0.054 | 0.019 | 0.012 | −65.63 | Moderate Stress |
| MIC-70076 | 0.027 | 0.061 | 0.013 | 123.07 | Severe Stress |
| MIC-70076 | 0.055 | 0.083 | 0.011 | 52.29 | Severe Stress |
| MIC-70076 | 0.020 | 0.014 | 0.010 | −26.94 | Severe Stress |
| MIC-73019 | 0.044 | 0.049 | 0.013 | 11.88 | Severe Stress |
| MIC-73019 | 0.037 | 0.034 | 0.014 | −7.26 | Severe Stress |
| MIC-79613 | 0.072 | 0.085 | 0.017 | 18.12 | Moderate Stress |
| MIC-82330 | 0.072 | 0.086 | 0.011 | 19.12 | Moderate Stress |
| MIC-82330 | 0.054 | 0.029 | 0.013 | −46.04 | Moderate Stress |
| MIC-82330 | 0.027 | 0.040 | 0.011 | 46.77 | Severe Stress |
| MIC-82330 | 0.055 | 0.057 | 0.011 | 4.21 | Severe Stress |
| MIC-82330 | 0.044 | 0.040 | 0.010 | −7.84 | Severe Stress |
| MIC-83010 | 0.061 | 0.077 | 0.015 | 26.57 | Moderate Stress |
| MIC-83010 | 0.027 | 0.035 | 0.013 | 27.3 | Severe Stress |
| MIC-68773 | 0.061 | 0.061 | 0.012 | 0.12 | Moderate Stress |
| MIC-68773 | 0.040 | 0.051 | 0.017 | 27.75 | Severe Stress |
| MIC-68773 | 0.053 | 0.036 | 0.010 | −30.76 | Severe Stress |
| MIC-54778 | 0.058 | 0.087 | 0.014 | 48.64 | Moderate Stress |
| MIC-54778 | 0.037 | 0.041 | 0.015 | 13.2 | Severe Stress |
| MIC-68901 | 0.026 | 0.067 | 0.016 | 154.38 | Severe Stress |
| MIC-68901 | 0.027 | 0.036 | 0.014 | 32.25 | Severe Stress |
| MIC-19814 | 0.078 | 0.067 | 0.017 | −14.11 | Moderate Stress |
| MIC-19814 | 0.027 | 0.040 | 0.009 | 48.02 | Severe Stress |
| MIC-80455 | 0.058 | 0.065 | 0.013 | 11.29 | Moderate Stress |
| MIC-80455 | 0.052 | 0.051 | 0.010 | −2.17 | Moderate Stress |
| MIC-87588 | 0.027 | 0.050 | 0.013 | 84.01 | Severe Stress |
| MIC-87588 | 0.026 | 0.036 | 0.013 | 38.41 | Severe Stress |
| MIC-86605 | 0.037 | 0.066 | 0.015 | 80.27 | Severe Stress |
| MIC-86605 | 0.044 | 0.055 | 0.013 | 27.08 | Severe Stress |
| MIC-54642 | 0.078 | 0.062 | 0.017 | −19.96 | Moderate Stress |
| MIC-54642 | 0.040 | 0.084 | 0.019 | 107.67 | Severe Stress |
| MIC-24837 | 0.061 | 0.067 | 0.016 | 10.35 | Moderate Stress |
| MIC-24837 | 0.052 | 0.035 | 0.012 | −31.55 | Moderate Stress |
| MIC-87198 | 0.078 | 0.083 | 0.019 | 6.27 | Moderate Stress |
| MIC-87198 | 0.037 | 0.035 | 0.013 | −4.14 | Severe Stress |
| MIC-29662 | 0.078 | 0.045 | 0.014 | −42.45 | Moderate Stress |
| MIC-29662 | 0.031 | 0.074 | 0.015 | 143.5 | Severe Stress |
| MIC-81265 | 0.058 | 0.050 | 0.015 | −13.36 | Moderate Stress |
| MIC-81265 | 0.040 | 0.055 | 0.016 | 37.42 | Severe Stress |
| MIC-88834 | 0.044 | 0.081 | 0.014 | 85.17 | Severe Stress |
| MIC-88834 | 0.040 | 0.056 | 0.014 | 40.29 | Severe Stress |
| MIC-84492 | 0.052 | 0.060 | 0.013 | 16.4 | Moderate Stress |
| MIC-84492 | 0.058 | 0.031 | 0.013 | −46.54 | Moderate Stress |
| MIC-90405 | 0.078 | 0.062 | 0.015 | −19.87 | Moderate Stress |
| MIC-90405 | 0.031 | 0.025 | 0.010 | −18.42 | Severe Stress |
| MIC-14439 | 0.061 | 0.037 | 0.011 | −39.74 | Moderate Stress |
| MIC-14439 | 0.031 | 0.104 | 0.018 | 240.75 | Severe Stress |
| MIC-87894 | 0.026 | 0.049 | 0.014 | 85.83 | Severe Stress |
| MIC-87894 | 0.040 | 0.041 | 0.013 | 3 | Severe Stress |
| MIC-52924 | 0.026 | 0.057 | 0.012 | 115.53 | Severe Stress |
| MIC-52924 | 0.031 | 0.050 | 0.014 | 62.67 | Severe Stress |
| MIC-73547 | 0.061 | 0.055 | 0.016 | −8.99 | Moderate Stress |
| MIC-73547 | 0.037 | 0.061 | 0.016 | 66.97 | Severe Stress |
| MIC-14970 | 0.052 | 0.043 | 0.012 | −17.09 | Moderate Stress |
| MIC-14970 | 0.044 | 0.075 | 0.017 | 71.81 | Severe Stress |

TABLE 4
Greenhouse testing of endophytes in Rhizoctonia solani treated
soybeans, showing % uplift (improvement) in shoot fresh weight in Rhizoctonia
conditions relative to untreated formulation controls. Each row represents
an experimental trial, where each trial contains 14 plants per treatment.
Measurements were taken 7 days after planting.

| | | Average | Standard | % | |
|---|---|---|---|---|---|
| | Average | Endophyte | Deviation | Improvement | Experiment |
| | Formulation | Treatment | Endophyte | Treatment | Stress |
| MIC-ID | Control (g) | (g) | Treatment | vs. Control | Level |
| MIC-70076 | 0.726 | 0.700 | 0.112 | −3.66 | Moderate Stress |
| MIC-70076 | 0.168 | 0.361 | 0.093 | 114.26 | Severe Stress |
| MIC-70076 | 0.257 | 0.440 | 0.107 | 71.41 | Severe Stress |
| MIC-70076 | 0.444 | 0.526 | 0.143 | 18.31 | Severe Stress |
| MIC-70076 | 0.380 | 0.401 | 0.104 | 5.44 | Severe Stress |
| MIC-70076 | 0.286 | 0.286 | 0.087 | 0.04 | Severe Stress |
| MIC-70076 | 0.322 | 0.249 | 0.059 | −22.64 | Severe Stress |
| MIC-70076 | 0.219 | 0.082 | 0.055 | −62.59 | Severe Stress |
| MIC-73019 | 0.280 | 0.197 | 0.084 | −29.6 | Moderate Stress |
| MIC-73019 | 0.190 | 0.222 | 0.072 | 16.97 | Severe Stress |
| MIC-79613 | 0.316 | 0.230 | 0.086 | −27.28 | Moderate Stress |
| MIC-79613 | 0.292 | 0.183 | 0.079 | −37.21 | Severe Stress |
| MIC-82330 | 0.280 | 0.283 | 0.093 | 1.17 | Moderate Stress |
| MIC-82330 | 0.444 | 0.410 | 0.118 | −7.85 | Severe Stress |
| MIC-83010 | 0.238 | 0.386 | 0.092 | 61.77 | Severe Stress |
| MIC-68773 | 0.729 | 0.812 | 0.043 | 11.45 | Mild Stress |
| MIC-68773 | 0.700 | 0.470 | 0.133 | −32.84 | Moderate Stress |
| MIC-68773 | 0.238 | 0.333 | 0.087 | 39.71 | Severe Stress |
| MIC-54778 | 0.257 | 0.384 | 0.084 | 49.63 | Severe Stress |
| MIC-54778 | 0.190 | 0.179 | 0.078 | −5.54 | Severe Stress |
| MIC-68901 | 0.230 | 0.416 | 0.131 | 80.72 | Severe Stress |
| MIC-80455 | 0.219 | 0.311 | 0.086 | 42.13 | Severe Stress |
| MIC-80455 | 0.257 | 0.296 | 0.111 | 15.26 | Severe Stress |
| MIC-87588 | 0.230 | 0.297 | 0.095 | 29.29 | Severe Stress |
| MIC-86605 | 0.280 | 0.256 | 0.082 | −8.36 | Moderate Stress |
| MIC-86605 | 0.190 | 0.125 | 0.068 | −34.01 | Severe Stress |
| MIC-24837 | 0.219 | 0.311 | 0.085 | 41.91 | Severe Stress |
| MIC-24837 | 0.238 | 0.312 | 0.085 | 30.74 | Severe Stress |
| MIC-87198 | 0.190 | 0.223 | 0.074 | 17.66 | Severe Stress |
| MIC-29662 | 0.260 | 0.403 | 0.101 | 55.15 | Moderate Stress |
| MIC-29662 | 0.529 | 0.361 | 0.090 | −31.89 | Moderate Stress |
| MIC-81265 | 0.257 | 0.220 | 0.081 | −14.25 | Severe Stress |
| MIC-88834 | 0.280 | 0.206 | 0.077 | −26.39 | Moderate Stress |
| MIC-84492 | 0.257 | 0.323 | 0.103 | 26.05 | Severe Stress |
| MIC-84492 | 0.219 | 0.231 | 0.092 | 5.68 | Severe Stress |
| MIC-90405 | 0.260 | 0.287 | 0.078 | 10.41 | Moderate Stress |
| MIC-14439 | 0.260 | 0.195 | 0.086 | −25.05 | Moderate Stress |
| MIC-14439 | 0.238 | 0.266 | 0.104 | 11.66 | Severe Stress |
| MIC-87894 | 0.529 | 0.225 | 0.085 | −57.49 | Moderate Stress |
| MIC-87894 | 0.230 | 0.297 | 0.095 | 29.33 | Severe Stress |
| MIC-87894 | 0.218 | 0.146 | 0.063 | −33.15 | Severe Stress |
| MIC-52924 | 0.260 | 0.211 | 0.092 | −18.98 | Moderate Stress |
| MIC-52924 | 0.218 | 0.320 | 0.100 | 47 | Severe Stress |
| MIC-52924 | 0.230 | 0.174 | 0.095 | −24.12 | Severe Stress |
| MIC-73547 | 0.238 | 0.447 | 0.116 | 87.36 | Severe Stress |
| MIC-73547 | 0.190 | 0.213 | 0.079 | 12.48 | Severe Stress |
| MIC-14970 | 0.280 | 0.379 | 0.091 | 35.5 | Moderate Stress |
| MIC-14970 | 0.219 | 0.055 | 0.054 | −74.77 | Severe Stress |

TABLE 5
Greenhouse testing of endophytes in Rhizoctonia solani treated corn, showing %
uplift (improvement) in shoot fresh weight in Rhizoctonia conditions relative to
untreated formulation controls. Each row represents an experimental trial, where each
trial contains 14 plants per treatment. Measurements were taken 7 days after planting.

| | | | Standard | | |
|---|---|---|---|---|---|
| | Average | Average | Deviation | % Improvement | |
| | Formulation | Endophyte | Endophyte | Treatment vs. | Experiment Stress |
| MIC-ID | Control (g) | Treatment (g) | Treatment | Control | Level |
| MIC-70076 | 0.478 | 0.585 | 0.063 | 22.41 | Moderate Stress |
| MIC-70076 | 0.326 | 0.252 | 0.026 | −22.7 | Moderate Stress |
| MIC-70076 | 0.339 | 0.261 | 0.043 | −23.23 | Moderate Stress |
| MIC-70076 | 0.310 | 0.344 | 0.040 | 10.95 | Severe Stress |
| MIC-70076 | 0.385 | 0.366 | 0.063 | −4.99 | Severe Stress |
| MIC-73019 | 0.219 | 0.224 | 0.035 | 2.36 | Severe Stress |
| MIC-79613 | 0.368 | 0.430 | 0.053 | 16.66 | Moderate Stress |
| MIC-82330 | 0.219 | 0.255 | 0.047 | 16.6 | Severe Stress |
| MIC-83010 | 0.287 | 0.230 | 0.031 | −19.62 | Moderate Stress |
| MIC-68773 | 0.287 | 0.321 | 0.047 | 12.13 | Moderate Stress |
| MIC-68901 | 0.245 | 0.229 | 0.051 | −6.55 | Moderate Stress |
| MIC-19814 | 0.316 | 0.269 | 0.040 | −15.1 | Moderate Stress |
| MIC-87588 | 0.326 | 0.291 | 0.045 | −10.62 | Moderate Stress |
| MIC-24837 | 0.245 | 0.264 | 0.031 | 8.08 | Moderate Stress |
| MIC-87198 | 0.219 | 0.283 | 0.043 | 29.14 | Severe Stress |
| MIC-61954 | 0.316 | 0.332 | 0.031 | 5.08 | Moderate Stress |
| MIC-61954 | 0.249 | 0.248 | 0.043 | −0.35 | Severe Stress |
| MIC-29662 | 0.287 | 0.202 | 0.044 | −29.47 | Moderate Stress |
| MIC-81265 | 0.316 | 0.372 | 0.045 | 17.46 | Moderate Stress |
| MIC-88834 | 0.316 | 0.228 | 0.046 | −27.83 | Moderate Stress |
| MIC-84492 | 0.326 | 0.249 | 0.042 | −23.49 | Moderate Stress |
| MIC-90405 | 0.219 | 0.289 | 0.035 | 31.88 | Severe Stress |
| MIC-14439 | 0.326 | 0.323 | 0.049 | −0.73 | Moderate Stress |
| MIC-87894 | 0.334 | 0.343 | 0.045 | 2.83 | Moderate Stress |
| MIC-87894 | 0.245 | 0.230 | 0.031 | −5.92 | Moderate Stress |
| MIC-52924 | 0.245 | 0.284 | 0.025 | 16.33 | Moderate Stress |
| MIC-52924 | 0.334 | 0.290 | 0.047 | −13.17 | Moderate Stress |
| MIC-73547 | 0.287 | 0.279 | 0.032 | −2.8 | Moderate Stress |
| MIC-14970 | 0.219 | 0.221 | 0.042 | 0.91 | Severe Stress |

TABLE 6
Greenhouse testing of endophytes in Pythium ultimum treated winter wheat, showing
% uplift (improvement) in shoot fresh weight in Pythium conditions relative to untreated
formulation controls. Each row represents an experimental trial, where each trial contains
13-14 plants per treatment. Measurements were taken 7 days after planting.

| | | | Standard | | |
|---|---|---|---|---|---|
| | Average | Average | Deviation | % Improvement | |
| | Formulation | Endophyte | Endophyte | Treatment vs. | Experiment Stress |
| MIC-ID | Control (g) | Treatment (g) | Treatment | Control | Level |
| MIC-70076 | 0.0686 | 0.1172 | 0.0128 | 70.79 | Moderate Stress |
| MIC-70076 | 0.0687 | 0.1049 | 0.0112 | 52.69 | Moderate Stress |
| MIC-70076 | 0.0670 | 0.0800 | 0.0185 | 19.4 | Moderate Stress |
| MIC-70076 | 0.0361 | 0.0879 | 0.0158 | 143.96 | Severe Stress |
| MIC-73019 | 0.0243 | 0.0853 | 0.0175 | 251.2 | Severe Stress |
| MIC-82330 | 0.0243 | 0.0859 | 0.0174 | 253.59 | Severe Stress |
| MIC-68773 | 0.0681 | 0.0316 | 0.0153 | −53.58 | Moderate Stress |
| MIC-68773 | 0.0261 | 0.0535 | 0.0089 | 104.81 | Severe Stress |
| MIC-68901 | 0.0409 | 0.0599 | 0.0165 | 46.34 | Moderate Stress |
| MIC-68901 | 0.0309 | 0.0821 | 0.0191 | 165.48 | Severe Stress |
| MIC-19814 | 0.0551 | 0.1264 | 0.0142 | 129.39 | Moderate Stress |
| MIC-87588 | 0.0309 | 0.0656 | 0.0171 | 111.97 | Severe Stress |
| MIC-24837 | 0.0409 | 0.0858 | 0.0173 | 109.47 | Moderate Stress |
| MIC-87198 | 0.0243 | 0.0836 | 0.0152 | 244.41 | Severe Stress |
| MIC-61954 | 0.0551 | 0.1257 | 0.0117 | 128.21 | Moderate Stress |
| MIC-81265 | 0.0551 | 0.1135 | 0.0184 | 106 | Moderate Stress |
| MIC-88834 | 0.0551 | 0.0718 | 0.0170 | 30.24 | Moderate Stress |
| MIC-90405 | 0.0243 | 0.0885 | 0.0163 | 264.55 | Severe Stress |
| MIC-87894 | 0.0409 | 0.1000 | 0.0171 | 144.2 | Moderate Stress |
| MIC-87894 | 0.0309 | 0.0690 | 0.0192 | 122.9 | Severe Stress |
| MIC-52924 | 0.0409 | 0.0960 | 0.0165 | 134.63 | Moderate Stress |
| MIC-52924 | 0.0309 | 0.0980 | 0.0192 | 216.66 | Severe Stress |
| MIC-14970 | 0.0243 | 0.1031 | 0.0181 | 324.39 | Severe Stress |

TABLE 7
Greenhouse testing of endophytes in Pythium ultimum treated soybeans, showing
% uplift (improvement) in shoot fresh weight in Pythium conditions relative to untreated
formulation controls. Each row represents an experimental trial, where each trial contains
14 plants per treatment. Measurements were taken 7 days after planting.

| | | | Standard | | |
|---|---|---|---|---|---|
| | Average | Average | Deviation | % Improvement | |
| | Formulation | Endophyte | Endophyte | Treatment vs. | Experiment Stress |
| MIC-ID | Control (g) | Treatment (g) | Treatment | Control | Level |
| MIC-70076 | 0.681519286 | 0.780716786 | 0.101911355 | 14.56 | Mild Stress |
| MIC-70076 | 0.499931786 | 0.541149286 | 0.132633987 | 8.24 | Moderate Stress |
| MIC-70076 | 0.567195107 | 0.444530857 | 0.148165398 | −21.63 | Moderate Stress |
| MIC-70076 | 0.431813321 | 0.119205321 | 0.076550572 | −72.39 | Moderate Stress |
| MIC-70076 | 0.376254607 | 0.102149893 | 0.068179552 | −72.85 | Moderate Stress |
| MIC-70076 | 0.219568929 | 0.216680714 | 0.08379432 | −1.32 | Severe Stress |
| MIC-70076 | 0.300859429 | 0.07093225 | 0.045564391 | −76.42 | Severe Stress |
| MIC-70076 | 0.377259071 | 0.075242571 | 0.071618867 | −80.06 | Severe Stress |
| MIC-73019 | 0.414505393 | 0.59976475 | 0.101351274 | 44.69 | Moderate Stress |
| MIC-79613 | 0.32095275 | 0.227044821 | 0.101189971 | −29.26 | Severe Stress |
| MIC-82330 | 0.566426214 | 0.733073357 | 0.1135387 | 29.42 | Moderate Stress |
| MIC-83010 | 0.566426214 | 0.745968 | 0.116391993 | 31.7 | Moderate Stress |
| MIC-83010 | 0.3529345 | 0.461483571 | 0.124803815 | 30.76 | Severe Stress |
| MIC-68773 | 0.606372286 | 0.568282 | 0.10183432 | −6.28 | Moderate Stress |
| MIC-68773 | 0.301981643 | 0.533778964 | 0.149431383 | 76.76 | Severe Stress |
| MIC-68773 | 0.3529345 | 0.27986925 | 0.11462408 | −20.7 | Severe Stress |
| MIC-54778 | 0.414505393 | 0.72064375 | 0.115995773 | 73.86 | Moderate Stress |
| MIC-54778 | 0.431813321 | 0.291673036 | 0.11259605 | −32.45 | Moderate Stress |
| MIC-68901 | 0.566426214 | 0.567824821 | 0.123225852 | 0.25 | Moderate Stress |
| MIC-68901 | 0.160529929 | 0.41745125 | 0.153202249 | 160.05 | Severe Stress |
| MIC-19814 | 0.566426214 | 0.606710643 | 0.095529637 | 7.11 | Moderate Stress |
| MIC-19814 | 0.28483625 | 0.182616643 | 0.098639515 | −35.89 | Severe Stress |
| MIC-80455 | 0.431813321 | 0.631045964 | 0.153621085 | 46.14 | Moderate Stress |
| MIC-87588 | 0.566426214 | 0.628242607 | 0.108383173 | 10.91 | Moderate Stress |
| MIC-87588 | 0.160529929 | 0.495691071 | 0.138343299 | 208.78 | Severe Stress |
| MIC-86605 | 0.414505393 | 0.475934143 | 0.132301443 | 14.82 | Moderate Stress |
| MIC-54642 | 0.409144286 | 0.558461071 | 0.112529788 | 36.49 | Moderate Stress |
| MIC-54642 | 0.28483625 | 0.511577429 | 0.143051623 | 79.6 | Severe Stress |
| MIC-24837 | 0.3529345 | 0.472880357 | 0.15260377 | 33.99 | Severe Stress |
| MIC-87198 | 0.414505393 | 0.709004571 | 0.130700051 | 71.05 | Moderate Stress |
| MIC-87198 | 0.28483625 | 0.427147821 | 0.14004676 | 49.96 | Severe Stress |
| MIC-61954 | 0.370836036 | 0.455275393 | 0.108643318 | 22.77 | Moderate Stress |
| MIC-29662 | 0.28483625 | 0.4648315 | 0.133143236 | 63.19 | Severe Stress |
| MIC-81265 | 0.431813321 | 0.335675571 | 0.145377129 | −22.26 | Moderate Stress |
| MIC-84492 | 0.431813321 | 0.566101536 | 0.135381278 | 31.1 | Moderate Stress |
| MIC-90405 | 0.28483625 | 0.552188321 | 0.126216186 | 93.86 | Severe Stress |
| MIC-14439 | 0.3529345 | 0.435111714 | 0.124928742 | 23.28 | Severe Stress |
| MIC-87894 | 0.160529929 | 0.471540036 | 0.123128327 | 193.74 | Severe Stress |
| MIC-87894 | 0.32697125 | 0.238861179 | 0.088605788 | −26.95 | Severe Stress |
| MIC-52924 | 0.160529929 | 0.310303179 | 0.122197025 | 93.3 | Severe Stress |
| MIC-52924 | 0.32697125 | 0.290218357 | 0.124847415 | −11.24 | Severe Stress |
| MIC-73547 | 0.414505393 | 0.542681357 | 0.129912886 | 30.92 | Moderate Stress |
| MIC-73547 | 0.3529345 | 0.350298036 | 0.128556685 | −0.75 | Severe Stress |

### Example 9. Soybean Cyst Nematode Preparation

[0183] The eggs of Heterodera glycines are extracted from soybean stock culture and are used as inoculum for in vitro, growth chamber, greenhouse, and microplot experiments.

[0184] In one embodiment, the following method is used. Eggs are extracted from a 60-day-old soybean stock culture maintained in, e.g., 500 ml polystyrene pots. The soil is gently washed from the soybean roots and cysts and females are dislodged from the roots. Water with the cyst and female suspension is poured through nested 850-μm-pore and 250-μm-pore sieves to separate trash from cysts and females. Cysts and females are ground with a mortar and pestle to release the eggs. Eggs are washed with water, collected on a 25-μm-pore sieve, transferred to two 50 ml centrifuge tubes, and spun for 5 minutes at 1,750 r.p.m. The supernatant liquid is then poured off and a sugar solution added (1 lb. cane sugar, 1 liter water), thoroughly mixing sugar solution and sediment. The suspension is centrifuged at 240 g for 1 minute. The supernatant containing the nematodes is poured on to the 25-μm-pore sieve. After rinsing the sugar away with water, the nematodes are ready for use. For in vitro tests, H. glycines eggs are placed in a modified Baermann funnel (Castillo J D., Lawrence K S., Kloepper J W. Biocontrol of the reniform nematode by Bacillus firmus GB126 and Paecilomyces lilacinus 251 on cotton. Plant Disease. 2013; 97:967-976) on a Slide Warmer (Model 77) (Marshall Scientific, Brentwood, NH) and incubated at 31° C. for 5 to 7 days to obtain the J2. The J2 are collected on a 25-μm-pore sieve, transferred to 1.5 ml microcentrifuge tubes, centrifuged at 5,000 g for 1 minute, rinsed with sterile distilled water, and centrifuged at 5,000 g for 1 minute. The J2 suspensions are adjusted to 30 to 40 J2 per 10 μl of water. Eggs are enumerated at 40× magnification with an inverted TS100 Nikon microscope and standardized to 2,000 eggs per 500 ml polystyrene pot.

### Example 10. Greenhouse Assessment of Improved Plant Health Under Biotic Stress (Soybean Cyst Nematode)

[0185] This example describes an exemplary method by which improved plant health of endophyte treated plants may be shown in a growth environment comprising the crop pest soybean cyst nematode (Heterodera glycines).

[0186] Greenhouse assays are conducted using soybean seeds (optionally, chemically treated soybean seeds) coated with one or more of the endophytes described herein and formulation control (lacking the one or more heterologously disposed endophytes) and untreated controls (lacking formulation and the one or more heterologously disposed endophyte) as described in Example 4. Microbe treated soybean seeds are planted, infected with nematodes, maintained, and phenotyped in grow rooms.

[0187] In one embodiment, the following method is used. 98 cones are placed in each cone-tainer to obtain the needed number of cone-tainers. Masks are placed over cones and cones are filled with soil. The cone-tainer is placed in a deep pan and water is added until the soil in the cones is saturated. Two soybean seeds are planted 2.5 cm deep in each cone-tainer. Each cone-tainer is placed in a growth tub and watered.

[0188] One ml containing 2,000 H. glycines eggs is pipetted into each cone-tainer at planting or the desired number of days after planting. Seedlings are thinned to one per cone-tainer after emergence and watered as appropriate.

[0189] Phenotyping is performed as follows. The height of each plant is measured, e.g., by placing the ruler on the lip of a cell and measuring the plant's height to the nearest millimeter. The mass of each plant is measured, e.g., by cutting the plant at the soil surface, placing the shoot in the weighing container, allowing the weight to stabilize, and autorecording the mass via the scale's software. The number of H. glycines cysts may be counted after extraction from soybean roots as described herein. The water suspension containing 150 cm\hat{ }3 of soil is poured through nested 75-μm and 25-μm-pore sieves to extract vermiform stages (juveniles and males). Vermiform stages are collected on the 75-μm-pore sieve and centrifuged using, e.g., the sucrose centrifugation-flotation method.

### Example 11. Greenhouse Assessment of Improved Plant Health Under Biotic Stress (Soybean Aphid)

[0190] This example describes an exemplary method by which improved plant health of endophyte treated plants may be shown in a growth environment comprising the crop pest soybean aphid (Aphis glycines).

[0191] Greenhouse assays are conducted using soybean seeds (optionally, chemically treated soybean seeds) coated with one or more of the endophytes described herein and formulation control (lacking the one or more heterologously disposed endophytes) and untreated controls (lacking formulation and the one or more heterologously disposed endophyte) as described in Example 4. Microbe treated soybean seeds are planted, infected with soybean aphids (Aphis glycines), maintained in grow rooms, and phenotyped.

[0192] In one embodiment, the following method is used. 98 cones are placed in each cone-tainer to obtain the needed number of cone-tainers. Masks are placed over cones and cones are filled with potting medium or soil. The cone-tainer is placed in a deep pan and water is added until the soil in the cones is saturated. One soybean seed is planted in each cone-tainer. Each cone-tainer is placed in a growth tub and watered.

[0193] A community of soybean aphids is maintained on a stock of soybean plants. To prepare for infestation of the experimental plants, leaves are removed from infested soybean plants from the stock community. One or more leaves are examined under a stereoscope to make sure the aphids are alive and vigorous. Infested leaf cutlets are placed in square plates to keep leaves alive until the treatment plants are infested with aphids. In some embodiments, 20 infested leaf cutlets are used per each 98 cone tray used in the experiment. The infested leaf cutlets are introduced to the growth environment of the experimental plants at planting or the desired number of days after planting, in some embodiments, 9 days after planting. The experimental cone-tainers are infested following an infestation pattern to allow for aphid choice feeding in planta. The infested experimental plants are maintained in their growth environment until phenotyping.

[0194] The plants may be phenotyped at one or more times after infestation, for example 1 day, 4 days, 7 days or more after infestation. Measurement of one or more traits of agronomic importance is performed as follows. The height of each plant is measured, e.g., by placing the ruler on the lip of a cell and measuring the plant's height to the nearest millimeter or using an automated tool such as a Phenospex PlantEye 3D laser scanner (Phenospex B.V., Heerlen, The Netherlands). Other traits of agronomic importance may be measured either manually or using a tool such as the Phenospex PlantEye 3D laser scanner, for example the greenness of the plants and the leaf and/or above ground plant area. The mass of each plant may be measured for example via destructive sampling, e.g., by cutting the plant at the soil surface, placing the shoot in the weighing container, allowing the weight to stabilize, and autorecording the mass via the scale's software. The experimental plants may be maintained through their reproductive stages, and traits of agronomic importance such as number of flowers, number of pods and number of seeds per pod may be measured.

### Example 12. Greenhouse Assessment of Improved Plant Health Under Biotic Stress

[0195] This example describes an exemplary method by which improved plant health of endophyte treated plants was shown in a growth environment comprising the crop pathogen Fusarium sp., one of the causal agents of seedling damping off disease. This assay may utilize dicots or monocots, including, for example, soybean and wheat as shown here.

[0196] Preparation of Fusarium sp. Inoculum. A stock of Fusarium sp. was grown on a standard potato dextrose agar plate. Plugs of fresh mycelium were then transferred into breathable bag containing a sterile mixture of water and grain such as sorghum or millet. After sufficient growth is achieved, the culture was removed from the bags and dried. After drying the biomass was coarsely ground.

[0197] Greenhouse assay setup The greenhouse assay was conducted in a media mixture consisting of a commercial potting mix and a minimum of 50% inert inorganic material. An appropriate volume of ground pathogen was added to the soil mixture to obtain moderate to severe symptoms.

[0198] This greenhouse assay was conducted using seeds coated with one or more endophytes described herein and formulation control (lacking the one or more heterologously disposed endophytes) and untreated controls (lacking the one or more heterologously disposed endophyte) as described in Example 4. Concentration of endophyte treatment applied to seeds ranged from approximately 10\hat{ }2-10\hat{ }8 CFU/seed (1E6 cells/mL to 3E8 cells/mL). A seed was added to the surface of the infested media. The seed was then covered with media lacking pathogen and again watered. High soil moisture levels were maintained throughout the course of the experiment. Replicates were included in a randomized design to obtain sufficient statistical power for analysis. Plants were grown in a controlled environment until 8-11 days after planting, approximately 4 days post emergence of control plants. At this point shoot fresh weight was measured on a per plant basis.

TABLE 8
Greenhouse testing of endophytes in Fusarium oxysporum treated soybeans, showing
% uplift (improvement) in shoot fresh weight in Fusarium conditions relative to untreated
formulation controls. Each row represents an experimental trial, where each trial contains
14 plants per treatment. Measurements were taken 10-12 days after planting.

| | | | Standard | | |
|---|---|---|---|---|---|
| | Average | Average | Deviation | % Improvement | |
| | Formulation | Endophyte | Endophyte | Treatment vs. | Experiment Stress |
| MIC-ID | Control (g) | Treatment (g) | Treatment | Control | Level |
| MIC-70076 | 0.784 | 0.713 | 0.079 | −9.110 | Mild Stress |
| MIC-70076 | 0.535 | 0.661 | 0.114 | 23.560 | Moderate Stress |
| MIC-70076 | 0.496 | 0.600 | 0.135 | 20.930 | Moderate Stress |
| MIC-70076 | 0.389 | 0.267 | 0.103 | −31.420 | Moderate Stress |
| MIC-70076 | 0.334 | 0.476 | 0.052 | 42.300 | Severe Stress |
| MIC-70076 | 0.378 | 0.420 | 0.048 | 11.150 | Severe Stress |
| MIC-82330 | 1.034 | 0.855 | 0.120 | −17.260 | Mild Stress |
| MIC-82330 | 0.171 | 0.260 | 0.053 | 52.120 | Severe Stress |
| MIC-82330 | 0.214 | 0.263 | 0.044 | 23.170 | Severe Stress |
| MIC-68773 | 0.942 | 0.751 | 0.087 | −20.310 | Mild Stress |
| MIC-87588 | 0.834 | 0.969 | 0.073 | 16.140 | Moderate Stress |
| MIC-29662 | 1.047 | 0.934 | 0.116 | −10.750 | Mild Stress |
| MIC-84492 | 0.651 | 0.822 | 0.148 | 26.290 | Moderate Stress |
| MIC-87894 | 0.751 | 0.952 | 0.040 | 26.700 | Moderate Stress |
| MIC-52924 | 0.490 | 0.683 | 0.112 | 39.310 | Severe Stress |

TABLE 9
Greenhouse testing of endophytes in Fusarium treated winter wheat, showing %
uplift (improvement) in shoot fresh weight in Fusarium oxysporum conditions
relative to untreated formulation controls. Each row represents an experimental
trial, where each trial contains 14 plants per treatment. Measurements were
taken at 7-9 days after planting.

| | | | Standard | | |
|---|---|---|---|---|---|
| | Average | Average | Deviation | % Improvement | |
| | Formulation | Endophyte | Endophyte | Treatment vs. | Experiment Stress |
| MIC-ID | Control (g) | Treatment (g) | Treatment | Control | Level |
| MIC-70076 | 0.059 | 0.081 | 0.010 | 38.630 | Moderate Stress |
| MIC-70076 | 0.047 | 0.058 | 0.005 | 24.530 | Moderate Stress |
| MIC-70076 | 0.029 | 0.036 | 0.004 | 23.110 | Moderate Stress |
| MIC-70076 | 0.037 | 0.039 | 0.004 | 6.520 | Moderate Stress |
| MIC-70076 | 0.056 | 0.059 | 0.006 | 5.790 | Moderate Stress |
| MIC-70076 | 0.021 | 0.031 | 0.003 | 44.530 | Severe Stress |
| MIC-70076 | 0.007 | 0.007 | 0.003 | 0.370 | Severe Stress |
| MIC-82330 | 0.036 | 0.044 | 0.004 | 23.710 | Moderate Stress |
| MIC-82330 | 0.049 | 0.042 | 0.005 | −13.440 | Moderate Stress |
| MIC-68773 | 0.037 | 0.046 | 0.005 | 25.460 | Moderate Stress |
| MIC-87588 | 0.034 | 0.038 | 0.006 | 9.690 | Moderate Stress |
| MIC-29662 | 0.054 | 0.056 | 0.005 | 3.930 | Moderate Stress |
| MIC-84492 | 0.070 | 0.075 | 0.008 | 7.740 | Moderate Stress |
| MIC-87894 | 0.029 | 0.017 | 0.004 | −42.610 | Severe Stress |
| MIC-52924 | 0.028 | 0.033 | 0.007 | 16.260 | Severe Stress |

### Example 13. Field Assessment of Improved Plant Health of Soy Under Biotic Stress

[0199] This example describes an exemplary method by which improved plant health of endophyte treated plants may be shown in a growth environment comprising the fungal pathogen Fusarium virguliforme.

[0200] Field trials were conducted using chemically treated soy seeds coated with MIC-70076 and untreated controls (lacking formulation and the one or more heterologously disposed endophyte) as described in Example 4. Plots are infected with Fusarium virguliforme, the causal agent of Fusarium Sudden Death Syndrome (SDS). Replicate plots, preferably at least 4 replicate plots, are planted per endophyte or control treatment in a randomized complete block design. Each plot consists of a 7.62 m (25 ft.) by 0.76 m (2.5 ft.) row. The following early growth metrics are measured: early emergence, full emergence, plant height, fresh shoot weight, and fresh root weight.

[0201] The percent uplift relative to untreated plants was calculated using R (R Core Team, 2016. R: A language and environment for statistical computing. R Foundation for Statistical Computing, Vienna, Austria. R-project.org/).

TABLE 10
Field testing of endophytes in Fusarium treated soybeans, showing
% uplift (improvement) relative to untreated controls. Confirmed stress
data points represented confirmed Fusarium stress plots.

| | | Early | Full | Plant | Root | Shoot |
|---|---|---|---|---|---|---|
| Trial | Treatment | Emergence | Emergence | Height | Weight | Weight |
| All (42 data points) | Chemical treatment | 11.2 | 5.5 | 2.5 | −1.5 | 3.5 |
| All (42 data points) | MIC-70076 | 3.3 | 1.5 | 2 | 4.4 | 6.8 |
| Confirmed Stress | Chemical treatment | 27 | 9.2 | −2.5 | −4.1 | 4.6 |
| (18 data points) | | | | | | |
| Confirmed Stress | MIC-70076 | 15 | 6.7 | −2.2 | 5.2 | 8.8 |
| (18 data points) | | | | | | |

### Example 14. Field Assessment of Improved Plant Health of Soy Under Biotic Stress

[0202] This example describes an exemplary method by which improved plant health of endophyte treated plants may be shown in a growth environment comprising the fungal pathogen Rhizoctonia solani.

[0203] Field trials were conducted using chemically treated soy seeds coated with MIC-70076 and untreated controls (lacking formulation and the one or more heterologously disposed endophyte) as described in Example 4. Plots are infected with Rhizoctonia solani. Replicate plots, preferably at least 4 replicate plots, are planted per endophyte or control treatment in a randomized complete block design. Each plot consists of a 7.62 m (25 ft.) by 0.76 m (2.5 ft.) row. The following early growth metrics are measured: early emergence, full emergence, plant height, fresh shoot weight, and fresh root weight.

[0204] The percent uplift relative to untreated plants was calculated using R (R Core Team, 2016. R: A language and environment for statistical computing. R Foundation for Statistical Computing, Vienna, Austria. R-project.org/).

TABLE 11
Field testing of endophytes in Rhizoctonia treated soybeans,
showing % uplift/improvement relative to untreated controls.

| | | | Early | Full | Plant | Root | Shoot |
|---|---|---|---|---|---|---|---|
| Year | Trial | Treatment | Emergence | Emergence | Height | Weight | Weight |
| 1 | All (12 data points) | Chemical | 12.6 | 58.3 | 2.6 | −6.4 | 13.4 |
| | | treatment | | | | | |
| | All (12 data points) | MIC-70076 | 19.6 | 19.7 | 1 | 3.7 | 6.6 |
| 2 | All (42 data points) | Chemical | 22.2 | 15.3 | 2.3 | −3.6 | 3.7 |
| | | treatment | | | | | |
| | All (42 data points) | MIC-70076 | 14 | 1.2 | −0.2 | 1.6 | −5.4 |

### Example 15. Field Assessment of Improved Plant Health of Soy Under Biotic Stress

[0205] This example describes an exemplary method by which improved plant health of endophyte treated plants may be shown in a growth environment comprising the oomycetes pathogen Pythium.

[0206] Field trials were conducted using chemically treated soy seeds coated with MIC-70076 and untreated controls (lacking formulation and the one or more heterologously disposed endophyte) as described in Example 4. Plots are infected with Pythium. Replicate plots, preferably at least 4 replicate plots, are planted per endophyte or control treatment in a randomized complete block design. Each plot consists of a 7.62 m (25 ft.) by 0.76 m (2.5 ft.) row. The following early growth metrics are measured: early emergence, full emergence, plant height, fresh shoot weight, and fresh root weight.

[0207] The percent uplift relative to untreated plants was calculated using R (R Core Team, 2016. R: A language and environment for statistical computing. R Foundation for Statistical Computing, Vienna, Austria. R-project.org/).

TABLE 12
Field testing of endophytes in Pythium treated soybeans, showing
% uplift/improvement relative to untreated controls. Confirmed stress
data points represented confirmed Pythium stress plots

| | | | Early | Full | Plant | Root | Shoot |
|---|---|---|---|---|---|---|---|
| Year | Trial | Treatment | Emergence | Emergence | Height | Weight | Weight |
| 1 | All | Chemical | −9.4 | 14.1 | 1.6 | 17 | 7.4 |
| | (12 data points) | treatment | | | | | |
| | All | MIC-70076 | 3.8 | 11.6 | −0.3 | 23.7 | 12.3 |
| | (12 data points) | | | | | | |
| 2 | All | Chemical | 4.8 | 2.9 | 0.8 | 2.3 | 7.9 |
| | (36 data points) | treatment | | | | | |
| | All | MIC-70076 | 6.4 | 3.8 | 1.3 | 5.3 | 0.3 |
| | (36 data points) | | | | | | |
| 2 | Confirmed Stress | Chemical | 10.9 | 6.6 | −1.6 | 10.6 | 6.8 |
| | (12 data points) | treatment | | | | | |
| | Confirmed Stress | MIC-70076 | 10.3 | 4.5 | −0.7 | 14.4 | −1.4 |
| | (12 data points) | | | | | | |

### Example 16. Field Assessment of Improved Plant Health of Cotton Under Biotic Stress

[0208] This example describes an exemplary method by which improved plant health of endophyte treated plants may be shown in a growth environment comprising the crop pests root knot nematode (Meloidogyne incognita), Reniform nematode (Rotylenchulus reniformis), and, opportunistically, the fungal pathogen Fusarium virguliforme.

[0209] Field trials are conducted using chemically treated cotton seeds coated with one or more of the endophytes described herein and formulation control (lacking the one or more heterologously disposed endophytes) and untreated controls (lacking formulation and the one or more heterologously disposed endophyte) as described in Example 4. Plots for in-field assessment harbor populations of root knot nematode and Reniform nematode, respectively, at an approximately 1.0+E04 eggs per gram of fresh root weight. Opportunistically, these plots are infected with natural inoculum of Fusarium virguliforme, the causal agent of Fusarium SDS. Replicate plots, preferably at least 4 replicate plots, are planted per endophyte or control treatment in a randomized complete block design. Each plot consists of a 7.62 m (25 ft.) by 0.76 m (2.5 ft.) row. The following early growth metrics are measured: percent emergence at 14 days post planting, standing count at 28 and 45 days post planting, plant vigor at 14, 28, and 45 days post planting, plant height at 45 days post planting, fresh shoot weight, fresh root weight, disease rating at a 0-3 scale (3 denotes strong disease symptoms) using the split-root scoring system at 45 days post planting, nematode count at 45 days post planting, and yield parameters.

[0210] At the end of the field trial employing endophyte treatment and control treatment plants, plants (preferably at least 4 plants) are randomly dug out from each row, kept in a plastic bag, and brought back to lab for metric measurements. For each seedling, shoot and root are separated by cutting the seedling 3 cm from the first branch of the root. The heights of the separated shoot of each plant are measured, followed by fresh shoot weight, and fresh root weight. The main root is vertically split into two halves and discoloration of xylem is scored as described above. To extract and count nematode eggs on root, roots are placed in a container prefilled with 100 ml 10% sucrose and incubated on a shaker at room temperature overnight. The supernatant is then collected and nematode eggs are counted under a stereomicroscope.

[0211] The percentage of survival plants, fresh root weight, and nematode egg count are plotted as bar graph of mean±95% confidence interval from the mean using the ggplot2 package of R (R Core Team, 2016. R: A language and environment for statistical computing. R Foundation for Statistical Computing, Vienna, Austria. R-project.org/). Plant heights, fresh shoot weight, and disease scores are plotted as jittered dot of mean±nonparametric bootstrap (1000) of 95% confidence interval from the mean using the ggplot2 package of R.

### Example 17. Field Assessment of Improved Plant Health of Winter Wheat Under Biotic Stress

[0212] This example describes a method for detection of improved plant health of endophyte treated winter wheat in a growth environment comprising the crop pathogens Rhizoctonia spp., Pythium spp., and Fusarium spp (causal agents of damping-off disease).

[0213] Field trials are conducted using winter wheat seeds coated with an endophyte of the present invention and untreated controls (lacking formulation and the heterologously disposed endophyte). Rhizoctonia, Fusarium, and Pythium inoculant are applied per standard practice to each seed packet before planting. Five replicate plots are planted per endophyte treatment and control treatment in a randomized complete block design. Each plot consists of a 6 ft. by 20 ft. block. Irrigation is applied pre-planting and in early season to maximize disease pressure. Plots are harvested by machine, and yield is calculated by the on-board computer.

### Example 18. Field Assessment of Improved Plant Health of Corn Under Biotic Stress

[0214] This example describes a method for detection of improved plant health of endophyte treated corn in a growth environment comprising the crop pathogen Fusarium spp.

[0215] Field trials were conducted using corn seeds coated with MIC-70076, a control treated with chemical fungicide (lacking formulation and the heterologously disposed endophyte), and untreated controls (lacking formulation and the heterologously disposed endophyte). Fusarium inoculant was applied per standard practice to each seed packet before planting, targeting moderate level of disease infestation; enough to affect plant stand, but not to a level resulting in total loss. Five replicate plots were planted per endophyte treatment and control treatment in a randomized complete block design. Each plot consisted of a 25 ft. long, 2-4 row block.

[0216] Plots were harvested by machine, and yield was calculated by the on-board computer.

TABLE 13
Field testing of endophytes in Fusarium treated corn, showing
% uplift/improvement relative to untreated controls. Confirmed stress
data points represented confirmed Fusarium stress plots.

| | | | Early | Full | Plant | Root | Shoot |
|---|---|---|---|---|---|---|---|
| Year | Trial | Treatment | Emergence | Emergence | Height | Weight | Weight |
| 1 | All | Chemical | 4.6 | −0.5 | 2.5 | 4.4 | 9.9 |
| | (12 data points) | treatment | | | | | |
| | All | MIC-70076 | −1 | −1.4 | 2.1 | 1.4 | 5.3 |
| | (12 data points) | | | | | | |
| 2 | All | Chemical | 8.7 | 6.3 | 2.3 | −0.3 | −1.9 |
| | (54 data points) | treatment | | | | | |
| | All | MIC-70076 | 3.2 | 1.7 | 1 | −6.1 | −4.9 |
| | (54 data points) | | | | | | |
| | Confirmed Stress | Chemical | 12.9 | 8.8 | 6.5 | 10.7 | 18.1 |
| | (36 data points) | treatment | | | | | |
| | Confirmed Stress | MIC-70076 | 5.2 | 3.3 | 6.6 | 3.6 | 3 |
| | (36 data points) | | | | | | |

### Example 19. Field Assessment of Improved Plant Health of Corn Under Biotic Stress

[0217] This example describes a method for detection of improved plant health of endophyte treated cotton in a growth environment comprising the crop pathogen Pythium spp.

[0218] Field trials were conducted using cotton seeds coated with MIC-70076, a control treated with chemical fungicide (lacking formulation and the heterologously disposed endophyte), and untreated controls (lacking formulation and the heterologously disposed endophyte). Pythium inoculant was applied per standard practice to each seed packet before planting, targeting moderate level of disease infestation; enough to affect plant stand, but not to a level resulting in total loss. Five replicate plots were planted per endophyte treatment and control treatment in a randomized complete block design. Each plot consisted of a 25 ft. long, 2-4 row block.

[0219] Plots were harvested by machine, and yield was calculated by the on-board computer.

TABLE 14
Field testing of endophytes in Pythium treated corn, showing %
uplift (improvement) relative to untreated controls. Confirmed stress
data points represented confirmed Pythium stress plots.

| | | | Early | Full | Plant | Root | Shoot |
|---|---|---|---|---|---|---|---|
| Year | Trial | Treatment | Emergence | Emergence | Height | Weight | Weight |
| 1 | All | Chemical | 19.1 | 11.5 | 2.7 | 13.1 | 13.5 |
| | (12 data points) | treatment | | | | | |
| | All | MIC-70076 | 0.9 | 1.9 | 2.2 | 9.6 | 6.8 |
| | (12 data points) | | | | | | |
| | Confirmed Stress | Chemical | 69.9 | 24.3 | 15.7 | 23 | 32.9 |
| | (6 data points) | treatment | | | | | |
| | Confirmed Stress | MIC-70076 | 4.8 | 6.1 | 9.3 | 18.2 | 18.3 |
| | (6 data points) | | | | | | |
| 2 | All | Chemical | 14.6 | 10.3 | 6.1 | 12.7 | 15.7 |
| | (48 data points) | treatment | | | | | |
| | All | MIC-70076 | 4.6 | 2.9 | −0.5 | 6.1 | 2 |
| | (48 data points) | | | | | | |

### Example 20. Field Assessment of Improved Plant Health of Soybean Under Biotic Stress

[0220] This example describes an exemplary method for detection of improved plant health of endophyte treated soybean in a growth environment comprising the crop pathogen Rhizoctonia.

[0221] Field trials were conducted using cotton seeds coated with MIC-70076, a control treated with chemical fungicide (lacking formulation and the heterologously disposed endophyte), and untreated controls (lacking formulation and the heterologously disposed endophyte). Rhizoctonia inoculant was applied per standard practice to each seed packet before planting, targeting moderate level of disease infestation; enough to affect plant stand, but not to a level resulting in total loss. At least four replicate plots were planted per endophyte treatment and control treatment in a randomized complete block design. Each plot consisted of approximately a 25 ft. long, 2-4 row block.

[0222] Plots were harvested by machine, and yield is calculated by the on-board computer.

TABLE 15
Field testing of endophytes in Rhizoctonia treated corn, showing
% uplift (improvement) relative to untreated controls. Confirmed stress
data points represented confirmed Rhizoctonia stress plots.

| | | | Early | Full | Plant | Root | Shoot |
|---|---|---|---|---|---|---|---|
| Year | Trial | Treatment | Emergence | Emergence | Height | Weight | Weight |
| 1 | All | Chemical | −2.7 | −1 | 2.7 | 8.6 | 8.5 |
| | (12 data points) | treatment | | | | | |
| | All | MIC-70076 | 0.2 | −0.9 | 1.7 | 12.6 | 12.5 |
| | (12 data points) | | | | | | |
| 2 | All | Chemical | 11.5 | 7.7 | 7.1 | 10.2 | 10.3 |
| | (42 data points) | treatment | | | | | |
| | All | MIC-70076 | 4.5 | 1.5 | 2.3 | 1.5 | 5.7 |
| | (42 data points) | | | | | | |
| | Confirmed Stress | Chemical | 13.4 | 15.1 | 8.9 | 14.9 | 17.8 |
| | (24 data points) | treatment | | | | | |
| | Confirmed Stress | MIC-70076 | 0 | 2.6 | 0.3 | 4.3 | 5.7 |
| | (24 data points) | | | | | | |

### Example 21. Method of Preparation of Endophytes and Heterologous Disposition of Endophytes on Seeds for Field Trials

### Preparation of Endophytes

[0223] Bacteria: An agar plug of each bacterial strain is transferred using a transfer tube to 4 ml of potato dextrose broth (PDB) in a 24 well plate and incubated at room temperature at 675 rpm on a shaker for 3 days. After growth of bacteria in broth, 200 μl is transferred into a spectrophotometer reading plate and bacteria OD is read at 600 nm absorbance. All bacteria strains are then normalized to 0.05 OD utilizing PBS 1x buffer.

[0224] Fungi: Preparation of molasses broth and potato dextrose agar: Molasses broth is prepared by dissolving 30 g molasses and 5 g yeast extract per liter deionized water in an autoclavable container and autoclaving (15 psi, 121° C.) for 45 min. Potato dextrose agar (PDA) plates are prepared by dissolving 39.0 g PDA powder per liter deionized water in an autoclavable container and autoclaving (15 psi, 121° C.) for 45 min. The agar is allowed to cool to 50-60° C., before pouring into sterile petri plates (30 ml per 90 mm plate). Fungal endophyte treatments may be applied as either a dry or liquid formulation.

[0225] Liquid biomass: All equipment and consumables are thoroughly sterilized and procedures performed in a biosafety cabinet. The inoculant is prepared by placing 1 plug from a cryopreserved stock on a fresh PDA plate, sealing the plate with Parafilm® and incubating at room temperature in the dark for 5-10 days. Then ˜5×5 mm plugs are cut from the PDA plates and 10-12 plugs are transferred into flasks containing the sterile molasses broth, covered, secured in a shaker and incubated for at least 10 days with shaking at ˜130 rpm. Then the culture is placed in a blender for 5 seconds and 1 ml of the blended culture is centrifuged and the supernatant is discarded. The pellet is resuspended in 0.5 ml 1x Phosphate Buffered Saline (PBS) to generate inoculum.

[0226] Dry biomass: All equipment and consumables are thoroughly sterilized and procedures performed in a biosafety cabinet. The inoculant is prepared by placing 1 plug from a cryopreserved stock on a fresh PDA plate, sealing the plate with Parafilm® and incubating at room temperature in the dark for 5-10 days. Then ˜5×5 mm plugs are cut from the PDA plates and 10-12 plugs are transferred into flasks containing the sterile molasses broth, covered, secured in a shaker and incubated for at least 10 days with shaking at ˜130 rpm. In sterile conditions, the liquid culture is carefully decanted using 150 mm sterile filter paper on a sterilized Buchner funnel over a sterile flask. Once all liquid passes through the funnel, the pellet is rinsed with sterile water until the filtrate runs clear. When dry, the pellet is transferred to a drying cabinet and dried until brittle. The pellet is then ground into a fine powder, and sample is used to generate CFU counts.

### Preparation of Formulation for Seed Treatments

[0227] A 2% weight/volume solution of sodium alginate for the seed coatings is prepared by the following method. An Erlenmeyer flask is filled with the appropriate volume of deionized water and warmed to 50 degrees Celsius on a heat plate with agitation using a stir bar. The appropriate mass of sodium alginate powder for the desired final concentration solution is slowly added until dissolved. The solution is autoclaved at 121 degrees Celsius at 15 PSI for 30 minutes to sterilize.

[0228] Talc for the powdered seed coatings is prepared by the following method. Talc is aliquoted into bags or 50 ml Falcon tubes and autoclaved in dry cycle (121 degrees Celsius at 15 PSI for 30 minutes) to sterilize.

### Heterologous Disposition of Endophytes on Seeds

[0229] Seeds treated were heterologously disposed to each endophyte according to the following seed treatment protocol.

[0230] Liquid formulation: Liquid culture is added to the seeds at a rate of 23 (for fungal endophyte treatments) or 8.4 (for bacterial endophyte treatments) ml per kg of seeds, with equivalent volumes of the prepared sodium alginate. Control treatments are prepared using equivalent volumes of sterile broth. The seeds are then agitated to disperse the solution evenly on the seeds. For fungal endophytes, 15 g per kg of seed of talc powder as prepared above is added and the seeds are agitated to disperse the powder evenly on the seeds. Then 16.6 ml (for fungal endophyte treatments) or 2.4 ml (for bacterial endophyte treatments) per kg of seed of Flo-Rite® 1706 (BASF, Ludwigshafen, Germany) is added and the seeds are agitated to disperse the powder evenly on the seeds. Slightly less Flo-Rite® is used for small grains and canola seeds, slightly more Flo-rite® is used for seeds such as corn, soy, cotton and peanut seeds. The target dose is generally between 10\hat{ }0-10\hat{ }6 CFU per seed, in some cases at least 10\hat{ }3 CFU per seed, or at least 10\hat{ }4 CFU per seed. Treated seeds are allowed to dry overnight in a well-ventilated space before planting.

[0231] Dry formulation: The 2% sodium alginate solution prepared above is added to the seeds at a rate of 23 ml per kg of seeds. Equal parts of dry biomass and talc prepared as above are mixed. The solution is applied so that an equivalent of 10 g of powdered dry biomass is applied per kg of seeds. Control treatments are prepared using equivalent volumes of talc. The seeds are then agitated to disperse the solution evenly on the seeds. Then 16.6 ml per kg of seed of Flo-Rite® 1706 (BASF, Ludwigshafen, Germany) is added and the seeds are agitated to disperse the powder evenly on the seeds. Slightly less Flo-Rite® is used for small grains and canola seeds, slightly more Flo-rite® is used for seeds such as corn soy, cotton and peanut seeds. The target dose is generally between 10\hat{ }0-10\hat{ }6 CFU per seed, in some cases at least 10\hat{ }3 CFU per seed, or at least 10\hat{ }4 CFU per seed. Treated seeds are allowed to dry overnight in a well-ventilated space before planting.

### Example 22. Field Assessment of Improved Plant Characteristics

### Rice

[0232] Field trials are conducted, preferably, at multiple locations. In some embodiments, rice seeds are treated with commercial fungicidal and insecticidal treatment. Seeds are heterologously disposed with the endophyte treatments and formulation control (lacking the one or more heterologously disposed endophytes) as described in Example 21, untreated seeds (lacking formulation and the one or more heterologously disposed endophyte) are also planted. Seeds are sown in regularly spaced rows in soil at 1.2 million seeds/acre seeding density. At each location at least 3 replicate plots are planted for each endophyte or control treatments in a randomized complete block design. For example, each plot may consist of seven, 15.24 m (40 ft.) rows.

[0233] At the end of the field trial employing endophyte treatment and control treatment plants, plots are harvested, for example, by machine with a 5-ft research combine and yield is calculated by the on-board computer.

### Wheat

[0234] Field trials are conducted at multiple locations with multiple plots per location. Wheat seeds (optionally treated with commercial fungicidal and insecticidal treatments) are heterologously disposed with the endophyte treatments as described in Example 21; untreated seeds (lacking formulation and the one or more heterologously disposed endophyte) are also planted. Seeds are sown in regularly spaced rows in soil at 1.2 million seeds/acre seeding density. At each location at least 3 replicate plots are planted for each endophyte or control treatments in a randomized complete block design. Each plot consists of seven, 15.24 m (40 ft.) rows.

[0235] Plots are harvested by machine, for example with a 5-ft research combine and yield was calculated by the on-board computer.

### Corn

[0236] Field trials are conducted at multiple locations, preferably with multiple plots per location. Plots may be irrigated, non-irrigated (dryland), or maintained with suboptimal irrigation at a rate to target approximately 25% reduction in yield. In some embodiments, corn seeds are treated with commercial fungicidal and insecticidal treatment. Seeds are heterologously disposed with the endophyte treatments as described in Example 21; untreated seeds (lacking formulation and the one or more heterologously disposed endophyte) are also planted. Seeds are sown in regularly spaced rows in soil at planting densities typical for each region. At each location at least 3 replicate plots are planted per endophyte or control treatment in a randomized complete block design. For example, each plot may consist of four 15.24 m (40 ft.) rows, each separated by 76.2 cm (30 in).

[0237] At the end of the field trial employing endophyte treatment and control treatment plants, plots are harvested, for example, by machine with a 5-ft research combine and yield is calculated by the on-board computer. Only the middle two rows of the 4 row plots are harvested to prevent border effects.

### Soy

[0238] Field trials are conducted, preferably, at multiple locations. Seeds are heterologously disposed with the endophyte treatments as described in Example 21, untreated seeds (lacking formulation and the one or more heterologously disposed endophyte) are also planted. In some embodiments, soybean seeds are treated with commercial fungicidal and insecticidal treatment. Seeds are sown in regularly spaced rows in soil at planting densities typical for each region, for example, at 180,000 seeds/acre seeding density. At each location at least 3 replicate plots are planted per endophyte or control treatment in a randomized complete block design). For example, each plot may consist of four 15.24 m (40 ft.) rows, each separated by 76.2 cm (30 in).

[0239] At the end of the field trial employing endophyte treatment and control treatment plants, plots are harvested, for example, by machine with a 5-ft research combine and yield is calculated by the on-board computer. Only the middle two rows of the 4 row plots are harvested to prevent border effects.

### Canola

[0240] Field trials are conducted at multiple locations, preferably in diverse geographic regions. Plots may be irrigated, non-irrigated (dryland) or maintained with suboptimal irrigation at a rate to target approximately 25% reduction in yield. In some embodiments, canola seeds are treated with commercial fungicidal and insecticidal treatment. Seeds are heterologously disposed with the endophyte treatments as described in Example 21, untreated seeds (lacking formulation and the one or more heterologously disposed endophyte) are also planted. At each location, at least 3 replicate plots are planted for each endophyte or control treatment in a randomized complete block design.

[0241] At the end of the field trial employing endophyte treatment and control treatment plants, plots are harvested, for example, by machine with a 5-ft research combine and yield is calculated by the on-board computer.

### Peanut

[0242] Field trials are conducted at multiple locations, preferably in diverse geographic regions. Optionally, plots are non-irrigated (dryland) or maintained with suboptimal irrigation at a rate to target approximately 25% reduction in yield. In some embodiments, peanut seeds are treated with commercial fungicidal and insecticidal treatment. Seeds are heterologously disposed with the endophyte treatments as described in Example 21, untreated seeds (lacking formulation and the one or more heterologously disposed endophyte) are also planted.

[0243] At the end of the field trial employing endophyte treatment and control treatment plants, plots are harvested, for example, by machine with a 5-ft research combine and yield is calculated by the on-board computer.

### Example 23. Method of Determining Seed Nutritional Quality Trait Component: Fat

[0244] Seed samples from harvested plants are obtained as described in Example 22. Analysis of fat is conducted on replicate samples according to the Association of Official Agricultural Chemists Reference Method AOAC 920.39, of the Official Methods of Analysis of AOAC International, 20th Edition (2016), herein incorporated by reference in its entirety. Samples are weighed onto filter paper, dried, and extracted in hot hexane for 4 hrs. using a Soxlhet system. Oil is recovered in pre-weighed glassware, and % fat is measured gravimetrically. Mean percent change between the treatment (endophyte-treated seed) and control (seed treated) with the formulation calculated.

### Example 24. Method of Determining Seed Nutritional Quality Trait Component: Ash

[0245] Seed samples from harvested plants are obtained as described in Example 22. Analysis of ash is conducted on replicate samples according to the Association of Official Agricultural Chemists Reference Method AOAC 920.39, of the Official Methods of Analysis of AOAC International, 20th Edition (2016). Samples are weighed into pre-weighed crucibles, and ashed in a furnace at 600° C. for 3 hr. Weight loss on ashing is calculated as % ash. Mean percent change between the treatment (one or more heterologously disposed endophytes) and control (lacking the one or more heterologously disposed endophytes) with the formulation calculated.

### Example 25. Method of Determining Seed Nutritional Quality Trait Component: Fiber

[0246] Seed samples from harvested plants are obtained as described in Example 22. Analysis of fiber is conducted on replicate samples according to the Association of Official Agricultural Chemists Reference Method AOAC 920.39, of the Official Methods of Analysis of AOAC International, 20th Edition (2016). Samples are weighed into filter paper, defatted and dried, and hydrolyzed first in acid, then in alkali solution. The recovered portion is dried, weighed, ashed at 600° C., and weighed again. The loss on ashing is calculated as % Fiber. Mean percent change between the treatment (one or more heterologously disposed endophytes) and control (lacking the one or more heterologously disposed endophytes) with the formulation calculated.

### Example 26. Method of Determining Seed Nutritional Quality Trait Component: Moisture

[0247] Seed samples from harvested plants are obtained as described in Example 22. Analysis of moisture is conducted on replicate samples according to the Association of Official Agricultural Chemists Reference Method AOAC 920.39, of the Official Methods of Analysis of AOAC International, 20th Edition (2016). Samples are weighed into pre-weighed aluminum dishes, and dried at 135° C. for 2 hrs. Weight loss on drying is calculated as % Moisture. Mean percent change between the treatment (one or more heterologously disposed endophytes) and control (lacking the one or more heterologously disposed endophytes) with the formulation calculated.

### Example 27. Method of Determining Seed Nutritional Quality Trait Component: Protein

[0248] Seed samples from harvested plants are obtained as described in Example 22. Analysis of protein is conducted on replicate samples according to the Association of Official Agricultural Chemists Reference Method AOAC 920.39, of the Official Methods of Analysis of AOAC International, 20th Edition (2016). Samples are combusted and nitrogen gas is measured using a combustion nitrogen analyzer (Dumas). Nitrogen is multiplied by 6.25 to calculate % protein. Mean percent change between the treatment (one or more heterologously disposed endophytes) and control (lacking the one or more heterologously disposed endophytes) with the formulation calculated.

### Example 28. Method of Determining Seed Nutritional Quality Trait Component: Carbohydrate

[0249] Seed samples from harvested plants are obtained as described in Example 22. Analysis of carbohydrate is determined for replicate samples as a calculation according to the following formula: Total Carbohydrate=100%-% (Protein+Ash+Fat+Moisture+Fiber), where % Protein is determined according to the method of Example 27, % Ash is determined according to the method of Example 24, % Fat is determined according to the method of Example 21, % Moisture is determined according to the method of Example 26, and % Fiber is determined according to the method of Example 25. Mean percent change between the treatment (one or more heterologously disposed endophytes) and control (lacking the one or more heterologously disposed endophytes) are calculated.

### Example 29. Method of Determining Seed Nutritional Quality Trait Component: Calories

[0250] Seed samples from harvested plants are obtained as described in Example 22. Analysis of Calories is determined for replicate samples as a calculation according to the following formula: Total Calories=(Calories from protein)+(Calories from carbohydrate)+Calories from fat), where Calories from protein are calculated as 4 Calories per gram of protein (as determined according to the method of Example 27), Calories from carbohydrate are calculated as 4 Calories per gram of carbohydrate (as determined according to the method of Example 28), and Calories from fat are calculated as 9 Calories per gram of fat (as determined according to the method of Example 23). Mean percent change between the treatment (one or more heterologously disposed endophytes) and control (lacking the one or more heterologously disposed endophytes) are calculated.

### Example 30. Additional Methods for Creating Synthetic Compositions

### Osmopriming and Hydropriming

[0251] One or more endophytes are inoculated onto seeds during the osmopriming (soaking in polyethylene glycol solution to create a range of osmotic potentials) and/or hydropriming (soaking in de-chlorinated water) process. Osmoprimed seeds are soaked in a polyethylene glycol solution containing one or more endophytes for one to eight days and then air dried for one to two days. Hydroprimed seeds are soaked in water for one to eight days containing one or more endophytes and maintained under constant aeration to maintain a suitable dissolved oxygen content of the suspension until removal and air drying for one to two days. Talc and or flowability polymer are added during the drying process.

### Foliar Application

[0252] One or more endophytes are inoculated onto aboveground plant tissue (leaves and stems) as a liquid suspension in dechlorinated water containing adjuvants, sticker-spreaders and UV protectants. The suspension is sprayed onto crops with a boom or other appropriate sprayer.

### Soil Inoculation

[0253] One or more endophytes are inoculated onto soils in the form of a liquid suspension, either; pre-planting as a soil drench, during planting as an in-furrow application, or during crop growth as a side-dress. One or more endophytes are mixed directly into a fertigation system via drip tape, center pivot or other appropriate irrigation system.

### Hydroponic and Aeroponic Inoculation

[0254] One or more endophytes are inoculated into a hydroponic or aeroponic system either as a powder or liquid suspension applied directly to the rockwool substrate or applied to the circulating or sprayed nutrient solution.

### Vector-Mediated Inoculation

[0255] One or more endophytes are introduced in power form in a mixture containing talc or other bulking agent to the entrance of a beehive (in the case of bee-mediation) or near the nest of another pollinator (in the case of other insects or birds. The pollinators pick up the powder when exiting the hive and deposit the inoculum directly to the crop's flowers during the pollination process.

### Root Wash

[0256] The method includes contacting the exterior surface of a plant's roots with a liquid inoculant formulation containing one or more endophytes. The plant's roots are briefly passed through standing liquid microbial formulation or liquid formulation is liberally sprayed over the roots, resulting in both physical removal of soil and microbial debris from the plant roots, as well as inoculation with microbes in the formulation.

### Seedling Soak

[0257] The method includes contacting the exterior surfaces of a seedling with a liquid inoculant formulation containing one or more endophytes. The entire seedling is immersed in standing liquid microbial formulation for at least 30 seconds, resulting in both physical removal of soil and microbial debris from the plant roots, as well as inoculation of all plant surfaces with microbes in the formulation. Alternatively, the seedling can be germinated from seed in or transplanted into media soaked with the microbe(s) of interest and then allowed to grow in the media, resulting in soaking of the plantlet in microbial formulation for much greater time, for example: hours, days or weeks. Endophytic microbes likely need time to colonize and enter the plant, as they explore the plant surface for cracks or wounds to enter, so the longer the soak, the more likely the microbes will successfully be installed in the plant.

### Wound Inoculation

[0258] The method includes contacting the wounded surface of a plant with a liquid or solid inoculant formulation containing one or more endophytes. Plant surfaces are designed to block entry of microbes into the endosphere, since pathogens attempt to infect plants in this way. One way to introduce beneficial endophytic microbes into plant endospheres is to provide a passage to the plant interior by wounding. This wound can take a number of forms, including pruned roots, pruned branches, puncture wounds in the stem breaching the bark and cortex, puncture wounds in the tap root, puncture wounds in leaves, puncture wounds seed allowing entry past the seed coat. Wounds can be made using tools for physical penetration of plant tissue such as needles. Microwounds may also be introduced by sonication. Into the wound can then be contacted the microbial inoculant as liquid, as powder, inside gelatin capsules, in a pressurized capsule injection system, or in a pressurized reservoir and tubing injection system, allowing entry and colonization by microbes into the endosphere. Alternatively, the entire wounded plant can be soaked or washed in the microbial inoculant for at least 30 seconds, giving more microbes a chance to enter the wound, as well as inoculating other plant surfaces with microbes in the formulation—for example pruning seedling roots and soaking them in inoculant before transplanting is a very effective way to introduce endophytes into the plant.

### Injection

[0259] The method includes injecting microbes into a plant in order to successfully install them in the endosphere. Plant surfaces are designed to block entry of microbes into the endosphere, since pathogens attempt to infect plants in this way. In order to introduce beneficial endophytic microbes to endospheres, we need a way to access the interior of the plant which we can do by puncturing the plant surface with a needle and injecting microbes into the inside of the plant. Different parts of the plant can be inoculated this way including the main stem or trunk, branches, tap roots, seminal roots, buttress roots, and even leaves. The injection can be made with a hypodermic needle, a drilled hole injector, or a specialized injection system, and through the puncture wound can then be contacted the microbial inoculant as liquid, as powder, inside gelatin capsules, in a pressurized capsule injection system, or in a pressurized reservoir and tubing injection system, allowing entry and colonization by microbes into the endosphere.

### Example 31. Identification of Sequence Variants Across Core Genes

[0260] Phylogenomic analysis of whole genome sequences of endophytes can be used to identify distinguishing sequence variants. Sets of genes suitable for phylogenomic analysis as well as methods for identifying the same are well known in the art, for example Floutas et al. (2012) The Paleozoic origin of enzymatic lignin decomposition reconstructed from 31 fungal genomes. Science, 336 (6089): 1715-9. doi: 10.1126/science.1221748 and James T Y, Pelin A, Bonen L, Ahrendt S, Sain D, Corradi N, Stajich J E. Shared signatures of parasitism and phylogenomics unite Cryptomycota and microsporidia. Curr Biol. 2013; 23 (16): 1548-53. doi: 10.1016/j.cub.2013.06.057. Orthologous genes to the reference set are identified in protein data bases derived from the genome of each species. Orthologous genes can be identified in the genomes using methods well known including reciprocal best hits (Ward N, Moreno-Hagelsieb G. Quickly Finding Orthologs as Reciprocal Best Hits with BLAT, LAST, and UBLAST: How Much Do We Miss? de Crécy-Lagard V, ed. PLOS ONE. 2014; 9 (7): e101850. doi: 10.1371/journal.pone.0101850) and Hidden Markov Models (HMMs). The best hits are extracted and a multiple sequence alignment generated for each set of orthologous genes. The alignments are used to build phylogenetic trees using methods well known in the art including Bayesian inference and maximum likelihood methods, for example using software tools MrBayes (Huelsenbeck, J. P. & Ronquist (2001) MRBAYES: Bayesian inference of phylogenetic trees. Bioinformatics, 17 (8): 754-755) and RAxML (Stamatakis, A. (2014) RAXML version 8: a tool for phylogenetic analysis and post-analysis of large phylogenies. Bioinformatics, 30 (9): 1312-1313. doi: 10.1093/bioinformatics/btu033). Sequence variants which distinguish between closely related species are identified.

### Example 32. Identification of Unique Genes in an Endophyte of Interest

[0261] Whole genome analysis of endophytes can be used to identify genes whose presence, absence or over or under representation (“differential abundance”) are associated with desirable phenotypes. To identify genes with differential abundance in the genome of an endophyte of interest, protein sequences predicted from the genomes of the endophyte and closely related species are compared in an all-vs-all pairwise comparison (for example, using BLAST) followed by clustering of the protein sequences based on alignment scores (for example, using MCL: Enright A. J., Van Dongen S., Ouzounis C. A. An efficient algorithm for large-scale detection of protein families. Nucleic Acids Research 30 (7): 1575-1584 (2002)). Additional software tools useful for this analysis are well known in the art and include OMA, OrthoMCL and TribeMCL (Roth A C, Gonnet G H, Dessimoz C. Algorithm of OMA for large-scale orthology inference. BMC Bioinformatics. 2008; 9:518. doi: 10.1186/1471-2105-9-518, Enright A J, Kunin V, Ouzounis C A. Protein families and TRIBES in genome sequence space. Nucleic Acids Res. 2003; 31 (15): 4632-8; Chen F, Mackey A J, Vermunt J K, Roos D S. Assessing performance of orthology detection strategies applied to eukaryotic genomes. PLOS One. 2007; 2 (4): e383). The protein clusters are queried to identify clusters with differential abundance of proteins derived from endophytes having desirable phenotypes. Proteins of these clusters define the unique properties of these endophytes, and the abundance of genes encoding these proteins may be used to identify endophytes of the present invention.

[0262] Having illustrated and described the principles of the present invention, it should be apparent to persons skilled in the art that the invention can be modified in arrangement and detail without departing from such principles. It is to be understood that while the invention has been described in conjunction with the detailed description thereof, the foregoing description is intended to illustrate and not limit the scope of the invention, which is defined by the scope of the appended claims. Other embodiments, advantages, and modifications are within the scope of the present invention.

The application's sequence listing, which the Patent Office published only in electronic form, follows.

SEQUENCE LISTING (2051 sequences)

SEQ ID NO: 1 - DNA, 726 bp, Kosakonia cowanii
  variation 522: note = n is a, c, g, or t
  source 1..726: mol_type = genomic DNA
atggctgttattaatactaacaccctgtcgctgatgactcagaacaacctgactaaatctcagtcttctctgggtacatctattgagcgcctgtcttccggcctgcgtattaacagtgctaaagatgatgccgcgggccaggcaattgccaaccgctttacttctaacatcaatggcctgaccgttgcagcgcgtaacgctaacgacggtatctctctggcacagaccgctgaaggcgcgctgagcgaaatcaacaacaacctgcagcgtatccgtgacctgaccgtacaggcgcagaacagctccaactccgcttctgacatcgactccatccaggctgaagttaaccagcgtatggaagaagtgaaccgcgtgaccacccagaccgacttcaacggcatcaaagtgctgaacaccggtaccggttcaagcagctacagcttccaggttggcgcgaaagataacgaaactatctccatcagcctgaccaagtctgactcctacaacctgtacaatgcgacntcccagaaccgtttcgagtccaccatcactaacctgaacaacaccgtgagcaacctgtcagcggcccgcagccgtattcaggactccgactatgcgacggaagtatcgaacatgtcccgcgcgcagatcctgcagcaggctggttcttccgtgctggcacaggccaaccaggttccgcagaccatgctctccctgctgcgttaa

SEQ ID NO: 2 - DNA, 945 bp, Kosakonia cowanii
  variation 320: note = n is a, c, g, or t
  variation 831: note = n is a, c, g, or t
  source 1..945: mol_type = genomic DNA
atggctgttattaatactaacaccctgtcgctgatgacccagaacaacctgactaaatcacagtcttctctgggtacttctattgagcgtctctcttccggtctgcgtatcaacagtgcaaaagatgatgctgctggtcaggcaattgccaaccgctttacttccaacatcaatggcctgggtgttgctgcccgtaacgccaacgacggtatctccctggcgcagaccgctgaaggcgcgctgagcgaaatcaacaacaacctgcagcgtatccgtgacctgaccgtacaggcgcagaacagctccaactccgcttctgnccagaccgacttcaacggcatcaaagtgctgaacaccggtaccggttcaagcagctacagcttccaggttggcgcgaaagataacgaaactatctccatcagcctgaccaagtctgactcctacaacctgtacaatgcgactggtgcaacggcgcagactaccggccagaccatcaacggcaacaaacgttctactgccgctgaaggcttcgacgttctgcagggtactgttgacgcgtccggtaaaaccaacggtggcccgctggccgacatcgactccgctatcaaagcggttgatgatcagcgcagcctgctgggtgcttcccagaaccgtttcgagtccaccatcactaacctgaacaacaccgtgagcaacctgtcagcggcccgcagccgtattcaggactccgactatgcgaccgaagtgtcgaacatgtcccgcgcgcagatcctgcagcaggccggttcttccgtgctggcacaggccaaccaggttccgcagaccatgctngtccctgctgcgttaattcgcagacatcagttgtacagaaaaagcgccgcttgtcggcgcttttttattttctgcgctgtgcgctttttcgacgattttcgcgcaaaagtataa

SEQ ID NO: 3 - DNA, 391 bp, Kosakonia cowanii
  source 1..391: mol_type = genomic DNA
atggctgttattaatactaacaccctgtcgctgatgacccagaacaacctgactaaatctcagtcttctctgggcacctcgattgagcgtctctcttccggtctgcgtatcaacagcgcgaaagacgatgctgctggtcaggcgatcgccaaccgctttacttctaacatcaacggcctgaccgttgctgcccgtaacgctaacgacggtatctctctggcacagaccgctgaaggcgcgctgagcgaagtgaacaacaacctgcagcgtatccgtgacctgaccgttcaggcgcagaacagctccaactccgcttctgacatcgactccatccaggctgaagttaaccagcgtatggaagagatcaaccgcgtgaccacccagaccgact

SEQ ID NO: 4 - DNA, 396 bp, Kosakonia cowanii
  source 1..396: mol_type = genomic DNA
gtgctgaacaccggtaccggttcaagcagctacagcttccaggttggcgcgaaagataacgaaactatctccatcagcctgaccaagtctgactcctacaacctgtacaatgcgaccggcgcaaccgcagcgactaccggccagaccatcaacggcaacaaacgttctactgccgctgaaggcttcgacgtactgaaaggtactgttgatgcgtccggtaacaccgatggcagcccgctggctgatatcgataaggccatcaaagcggttgacgatcagcgcagcatgctgggtgcgtcccagaaccgtttcgagtccaccattactaacctgaacaacaccgtgagcaacctgtcagcggcccgcagccgtattcaggactccgactacgcgacg

SEQ ID NO: 5 - DNA, 996 bp, Kosakonia cowanii
  variation 802: note = n is a, c, g, or t
  source 1..996: mol_type = genomic DNA
atggctgttattaatactaacaccctgtcgctgatgacccagaacaacctgactaaatcacagtcttctctgggcacttcgattgagcgtctctcttccggtctgcgtatcaacagtgcaaaagatgatgctgctggtcaggcgatcgccaaccgttttacctctaacatcaatggtcttaccgttgctgcccgtaacgctaacgacggtatctcgctggcacagaccgctgaaggcgcgctgagcgaagtgaacaacaacctgcagcgtatccgtgacctgaccgttcaggcacagaacagctccaactccgcgtccgatatcgactccatccaggctgaagttaaccagcgtatggaagagatcaaccgcgtgaccacccagaccgacttcaacggcatcaaagtgctgaacaccggtaccggttcaagcagctataacttccaggttggttctaaagataacgaaactatctccatcagcctgagcaagtctgactcctacaacctgtataacgccactggtgcaactgcggtaactactacccagaccatcaacggtaacgcgcgttctacttctgctgaaggcttcgacgtactgaaaggtaccgttgactccactggcggtaccaacggtgctccgctggcagatatcgatgctgccatcaaagcggttgacgatcagcgcagcatgctgggtgcgtcccagaaccgtttcgagtccaccattactaacctgaacaacaccgtgagcaacctgtcagcggcccgcagccgtattcaggactccgactacgcgacgngaagtgtcgaacatgtcccgcgcgcagatcctgcagcaggccggttcttccgtgctggcgcaggccaaccaggttccgcagaccatgctgtccctgctgcgttaatccgcagacactgttgtacagaaaagcgccgcttgtcggcgcttttttttatctctacggctatcacgccggacaatcgccagatttaa

SEQ ID NO: 6 - DNA, 521 bp, Kosakonia cowanii
  source 1..521: mol_type = genomic DNA
atggctgttattaatactaacaccctgtcgctgatgactcagaacaacctgactaaatctcagtcttctctgggtacatctattgagcgcctgtcttccggcctgcgtattaacagtgctaaagatgatgccgcgggccaggcaattgccaaccgctttacttctaacatcaatggcctgaccgttgcagcgcgtaacgctaacgacggtatctctctggcacagaccgctgaaggcgcgctgagcgaaatcaacaacaacctgcagcgtatccgtgacctgaccgtacaggcgcagaacagctccaactccgcttctgacatcgactccatccaggctgaagttaaccagcgtatggaagaagtgaaccgcgtgaccacccagaccgacttcaacggcatcaaagtgctgaacaccggtaccggttcaagcagctacagcttccaggttggcgcgaaagataacgaaactatctccatcagcctgaccaagtctgactcctacaacctgtacaatgcgac

SEQ ID NO: 7 - DNA, 510 bp, Kosakonia cowanii
  source 1..510: mol_type = genomic DNA
ccagaccgacttcaacggcatcaaagtgctgaacaccggtaccggttcaagcagctacagcttccaggttggcgcgaaagataacgaaactatctccatcagcctgaccaagtctgactcctacaacctgtacaatgcgactggtgcaacggcgcagactaccggccagaccatcaacggcaacaaacgttctactgccgctgaaggcttcgacgttctgcagggtactgttgacgcgtccggtaaaaccaacggtggcccgctggccgacatcgactccgctatcaaagcggttgatgatcagcgcagcctgctgggtgcttcccagaaccgtttcgagtccaccatcactaacctgaacaacaccgtgagcaacctgtcagcggcccgcagccgtattcaggactccgactatgcgaccgaagtgtcgaacatgtcccgcgcgcagatcctgcagcaggccggttcttccgtgctggcacaggccaaccaggttccgcagaccatgct

SEQ ID NO: 8 - DNA, 801 bp, Kosakonia cowanii
  source 1..801: mol_type = genomic DNA
atggctgttattaatactaacaccctgtcgctgatgacccagaacaacctgactaaatcacagtcttctctgggcacttcgattgagcgtctctcttccggtctgcgtatcaacagtgcaaaagatgatgctgctggtcaggcgatcgccaaccgttttacctctaacatcaatggtcttaccgttgctgcccgtaacgctaacgacggtatctcgctggcacagaccgctgaaggcgcgctgagcgaagtgaacaacaacctgcagcgtatccgtgacctgaccgttcaggcacagaacagctccaactccgcgtccgatatcgactccatccaggctgaagttaaccagcgtatggaagagatcaaccgcgtgaccacccagaccgacttcaacggcatcaaagtgctgaacaccggtaccggttcaagcagctataacttccaggttggttctaaagataacgaaactatctccatcagcctgagcaagtctgactcctacaacctgtataacgccactggtgcaactgcggtaactactacccagaccatcaacggtaacgcgcgttctacttctgctgaaggcttcgacgtactgaaaggtaccgttgactccactggcggtaccaacggtgctccgctggcagatatcgatgctgccatcaaagcggttgacgatcagcgcagcatgctgggtgcgtcccagaaccgtttcgagtccaccattactaacctgaacaacaccgtgagcaacctgtcagcggcccgcagccgtattcaggactccgactacgcgacg

SEQ ID NO: 9 - DNA, 909 bp, Kosakonia cowanii
  source 1..909: mol_type = genomic DNA
atggccgtcatcaataccaatacgctgtcactcatcaaccaaaataaccttaataaatcccaggcggcgcaaagctctgcaattcagcgtttatcctccggcctgcgtattaatagtgcgaaagatgatgctgcgggccaggcaattgccaaccgtttctcttccagcattagcggtatgggcgtggccgcaagaaatgccaacgatgctatttcgctggcacaaacggctgaaggtgcattaagcgaaatcaataacaacttgcagcgtatccgcgatctggccgtgcaggcgcaaaacagcactaactctgcctccgatgtcgactctattcagtcggaagtgaatgagcgtatggccgagattaaccgcgtgaccctgcagactgatttcaacggtatcaaaattctcaataccagctccggtacggccagttacggcttccatgtagggacagatgatggcgaagagattgttatcacgatgagcagcagcgatgactacaacctgggggcaaattccggttcgattggccaggtctctggcgaattcattcacggcaatgcacgcagcgtaaaagcagtcggctttgatgtgctccatggcaccgtcacccccttcagcggtgcgatactcaataatccgcttgccgccattgacgatgcgataaaagccgtcgatacccaacgcagttcgctcggggcatttcagaaccgctttgaatcgacgatcaataaccttaatcaggcggcgacgaatctttccgccgcgcgcagccgaatcaatgacgccgactatggcacggaagtgtcgaatatgagcagggcgcagatattacaacaggccggctcgtccgtgctggcgcaggccaaccaggtgccgcagaccatgctgtcgttgctgcgttaa

SEQ ID NO: 10 - DNA, 333 bp, Kosakonia cowanii
  source 1..333: mol_type = genomic DNA
atggctgttattaatactaacaccctgtcgctgacgacccagaacaacctgactaaatctcagtcttccctgggcactgcgatcgagcgtctctcttccggtctgcgtatcaacagtgcaaaagatgatgctgctggtcaggcgatcgctaaccgttttacctctaacatcaatggcctgggtgttgctgcccgtaacgccaacgacggtatctctctctcccagaccgctgaaggcgcgctgggcgaaatcaacaacaacctgcagcgtatccgtgacctgaccgttcaggcacagaacagctccaactccgcgtctgacatcgactccatc

SEQ ID NO: 11 - DNA, 363 bp, Kosakonia cowanii
  source 1..363: mol_type = genomic DNA
atggctgttattaatactaacaccctgtcgctgatgacccagaacaacctgactaaatcacagtcttctctgggtacttctattgagcgtctctcttccggtctgcgtatcaacagtgcaaaagatgatgctgctggtcaggcaattgccaaccgctttacttccaacatcaatggcctgggtgttgctgcccgtaacgccaacgacggtatctccctggcgcagaccgctgaaggcgcgctgagcgaagtgaacaacaacctgcagcgtatccgtgacctgaccgttcaggcgcagaacagctccaactccgcatctgacatcgactccatccaggctgaagttaaccagcgtatggaagag

SEQ ID NO: 12 - DNA, 1254 bp, Kosakonia cowanii
  source 1..1254: mol_type = genomic DNA
atgtcccaggttattaatactaacgcccttagcctcgtcgctcagaacaacctgaacaaatctcaggactctctgggtactgcaattgaacgtctctcttctggtctgcgtattaatagcgcgaaagacgatgcagcaggtcaggcgatctctaaccgtttcaccgccaacatcaacggtctgactcaggcttcccgtaacgccaacgatggtatctccatcgcgcagaccactgaaggcgcgctgaacgaaatcaacgacaacctgcagaacatccgtcgtctgtccgtacaggcacagaacggcaccaactccgattctgaccgtcagtccatccaggacgaaatcgatgcgcgtctggacgagatcaaccgtatctctgaacagaccgagttcaacggcgtgaaagtactgagcaaagaccagaagctctctatccaggttggttctaacgatggccagactatcgatatcgaactgaaccagatggactcttctactctgggtatggacggcttcagcgtagctaacggcattgacactactactctgactgcaagcaccggtacagtgaaagttgacagtggtttcgactacgatgcagctaaattcaccgacagtggcgcgaccgcagcaaccagcatcgacgatatcgtggttgatgataacggcgacgtgtttgcagtgaaaggcgctgaaatgtacgccgtaaccgaagatccgactactggtgaaatctccttcaactccgataacgacgttgccagctctgttgtgggcacaccgaccagcgttgttggtgaagatatgatgaaagaccaggctattaacatgaccggtatcaccggtacgttaatggaagatggtaaaggtaactactacgttgacgacggtgccggcaacctgactgaagcaactattgataccactacctggactgcaacggataccggtaaagctgtttctactactccggcaacttccgatccgctgaccaaaatcgacgaagcgctggcgcaggttgatgaaatgcgttccggtctgggtgcggtacagaaccgtttcgcgtctgttatcagcaacctgaacaacaccgttaacaacctgtctgaatcccgctctcgtattctggatgctgacttcgcgtctgaagtatctgaaatgagccgcgcgaacattctgcagtctgcaggcaccaccgtgctggcacaggctaaccaggttccgcagaacgtgctgtctctgctgggctaa

SEQ ID NO: 13 - DNA, 924 bp, Kosakonia cowanii
  source 1..924: mol_type = genomic DNA
atgcgtcttagcacaagttatatttttcaaaaccgcatagacagcctgggcgacgcgatgacgggttacaacgacctggcgacccgcctctctgctggccagacgctgctgaagccctctgacgatccaaccggcgcgtcgcagtctgtcactttacaaacggcgctgtcgcgcatgagccagttcgacaccgcgcgcacctacgcgcaggatgcgctgggccaggaagataacaccctggactctatcggcaacttgctgacagagaacctgacgcagaaagtgattgccggtggtaacggtgcttactctgacgaagatcgcgccgcgctggcggaagagttacagggcatccgcgacaacctgctggatctggcgaacaccaaaaacagtgacggtcgctatatttttgccggctataaaaccggcagcgcgccgttccaggccgatggcacctatgtcggcggcgataccgccatgacgcaggtggtctctgacagcaccgaaatgcaggtcggtcataccggctcagaggtgtttatgagcggcacgccggacgatctgtttgaagccctcgacaacgcgattgcgcagttgaaacagccggtcaccagcgatgccgacagggacgcgctgcaggctgtgctggatgattccaatgtcagcatcaagaagaatattgataacctcggcaaggtgcgcgccaccgtcggtaccaatatgcagcagattgaatcgttgggattcagcgctgaggctcaaagcatcaatgtgcagagccgcctgcaggaaaccttaggttcggactgggactcgatgattaccctgttatcccagtcaaagatgtcggaattcgcgcttaattcttccatgacggtatttcagtcgatgcagcagctctctattttcaaagtaatgggttga

SEQ ID NO: 14 - DNA, 909 bp, Kosakonia cowanii
  source 1..909: mol_type = genomic DNA
atggccgtcatcaataccaatacgctgtcactcatcaaccaaaataaccttaataaatcccaggcggcgcaaagctctgcaattcagcgtttatcctcaggtctgcgtattaacagcgcgaaagatgacgctgcgggccaggcgattgccaaccgtttctcctccagcattaacggcatgggcgtggccgcaagaaatgccaacgatgctatttctctggcacaaacggctgaaggcgcattaagcgaaataaataacaacttgcagcgtatccgcgatctggccgtgcaggcgcaaaacagcactaactctgcctccgatgtcgactctattcagtcggaagtgaatgaacgtatggccgagattaaccgcgtaactctccagacagattttaatggcatcaaaattctcaataccagctccggtgcggccagttacggcttccatgtagggacagatgatggcgaagagattgttatcacgatgagtagcagcgatgattacaacctgggggcaaattccggttcgattggccaggtctctggcgaatttattcacggcaatgcacgcagcgtaaaagcaatcggctttgatgtgctccatggcaccgtcaccccctttagcggtgcgatactcaataatcctcttgccgccattgacgatgcgataaaagccgtcgatacccaacgcagttcgctcggggcatttcagaaccgctttgaatcgacgatcaataaccttaaccaggcggcgacgaatctttccgccgcgcgcagccgaataaatgacgccgactatggcacggaagtgtcgaatatgagcagggcgcaaatattacaacaggccggctcgtccgtgctggcgcaggccaaccaggtgccgcagaccatgctgtcgctgctgcgttaa

SEQ ID NO: 15 - DNA, 1254 bp, Kosakonia cowanii
  source 1..1254: mol_type = genomic DNA
atgtcccaggttattaatactaacgcccttagcctcgtcgctcagaacaacctgaacaaatctcaggactctctgggtactgcaattgaacgtctctcttctggtctgcgtattaatagcgcgaaagacgatgcagcaggtcaggcgatctctaaccgtttcaccgctaacatcaacggtctgactcaggcttcccgtaacgccaacgatggtatctccattgcacagaccactgaaggcgcgctgaacgaaatcaacgacaacctgcagaacatccgtcgtctgtccgtacaggctcagaacggcaccaactccgattctgaccgtcagtccatccaggacgaaatcgacgcgcgtctggacgagatcaaccgtatctctgaacagaccgagttcaacggcgtgaaagtactgagcaaagaccagaagctctctatccaggttggttctaacgatggccagactatcgatatcgaactgaaccagatggactcttctactctgggtatggacggtttcagcgtagctaacggcattgacactactactctgactgcaagcaccggtacagtgaaagttgacagtggtttcgactacgatgcagctaaattcaccgacggtggcgcgaccgcagtaaccagcatcgacgatatcgtggttgatgataacggcgacgtgtttgcagtgaaaggcgctgaaatgtacgccgtaaccgaagatccgactactggtgaaatctccttcaactctgataacgacgttgccagctctgttgttggcacaccgaccagcgttgttggtgaagatatgatgaaagaccaggctattaacatgaccggtatcaccggtacgttaatggaagatggccagggtaactactatgttgacgacggtgccggcaacctgactgaagcgactattgataccactacctggactgcaacggataccggtaaagctgtttctactactccggcaacttccgatccgctgaccaaaatcgacgaagcgctggcgcaggttgatgaaatgcgttccggtctgggtgcggtacagaaccgtttcgcgtctgttatcagcaacctgaacaacaccgttaacaacctgtctgaatcccgctctcgtattctggatgctgacttcgcgtctgaagtatctgaaatgagccgcgcgaacattctgcagtctgcaggcaccaccgtgctggcacaggctaaccaggttccgcagaacgtgctgtctctgctgggctaa

SEQ ID NO: 16 - DNA, 924 bp, Kosakonia cowanii
  source 1..924: mol_type = genomic DNA
atgcgtcttagcacaagttatatttttcaaaaccgcatagacagcctgggcgacgcgatgacgggttacaacgacctggcgacccgcctctctgctggccagacgctgctgaagccctctgacgatccgaccggcgcgtcgcagtctgtcaccttacaaacggcgctgtcgcgcatgagccagttcgacaccgcgcgcacctacgcgcaggatgcattaggccaggaagataacaccctggactctatcggcaacttgctgacagagaacctgacgcagaaagtgatcgccggtggtaacggtgcctactctgacgaagatcgcgctgcgctggcagaagagttacagggcatccgcgataacctgctggatctggcgaataccaaaaacagcgacgggcgctatatttttgccggctataaaaccggtagcgcgccgttccaggccgatggcagctatgtcggcggtgatacggccatgacgcaggtggtctccgacagcaccgaaatgcaggttggtcataccggttcagaggtgtttctcagcggcacgccggacgatctgtttcaagccctcgacagcgcgattgcgcagctgaaacagccggtcaccagcgatgcggacagggatgcgctgcaagcagtgctggatgatgccaatgtcagcatcaagaaaaatattgataacctcggcaaggttcgcgccaccgtcggtaccaatatgcagcagattgaatcgctgggattcagcgctgaggctcaaagcatcaatgtgcagagccgtctgcaggaaacgttaggttcggactgggactcgatgattaccctgttatcccagtcaaagatgtctgaattcgcgcttaattcctccatgacggtatttcagtcgatgcagcagctctctatttttaaagtaatgggttga

SEQ ID NO: 17 - DNA, 363 bp, Kosakonia cowanii
  source 1..363: mol_type = genomic DNA
atggctgttattaatactaacaccctgtcgctgatgacccagaacaacctgactaaatcacagtcttctctgggcacctcgattgagcgtctctcttccggtctgcgtatcaacagcgcgaaagacgatgctgctggtcaggcgatcgcgaaccgctttacttctaacatcaacggcctgaccgttgctgcccgtaacgctaacgacggtatctctctggcacagaccgctgaaggcgcgctgagcgaagtgaacaacaacctgcagcgtatccgtgacctgaccgttcaggcgcagaacagctccaactccgcatctgacatcgactccatccaggctgaagttaaccagcgtatggaagag

SEQ ID NO: 18 - DNA, 906 bp, Kosakonia cowanii
  source 1..906: mol_type = genomic DNA
atggctgttattaatactaacaccctgtcgctgatgacccagaacaacctgactaaatcacagtcttctctgggcacctcgattgagcgtctctcttccggtctgcgtatcaacagtgcaaaagatgatgctgctggtcaggcgatcgccaaccgtttcacctctaacatcaatggtcttaccgttgctgcccgtaacgccaatgacggtatctccctggcgcagactgctgaaggcgcgctgagcgaagtgaacaacaacctgcagcgtatccgtgacctgaccgttcaggcacagaacagctccaactccgcgtccgatatcgactccatccaggctgaagttaaccagcgtatggaagagatcaaccgcgtgaccacccagaccgacttcaacggcattaaagtgctgaacaccggtaccggttcaagcagctataacttccaggttggttctaaagataacgaaactatctccatcagcctgagcaagtctgactcctacaacctctataacgccactggtgcaactgcggtaaccaccacccagaccatcaacggtaacgcgcgttctacttctgctgaaggcttcgacgtactgaaaggtaccgttgactccactggcggtaccaacggtgctccgctggcagatatcgatgcggccatcaaagcagttgacgatcagcgcagcatgctgggtgcgtcccagaaccgtttcgagtccaccatcactaacctgaacaacaccgtgagcaacctgtcagcggcacgcagccgtattcaggactccgactatgcgacggaagtgtcgaacatgtcccgcgcgcagatcctgcagcaggctggttcttccgtgctggcgcaggccaaccaggttccgcagaccatgctgtccctgctgcgttaa

SEQ ID NO: 19 - DNA, 440 bp, Kosakonia cowanii
  source 1..440: mol_type = genomic DNA
atggaagaagtgaaccgcgtaactaaccagaccgacttcaacggcattaaagtgctgaacaccggttccggcaccagcacctataacttccaggttggttcgaaagacggcgagaagatcggtatcgacatcagctccagcgacagctacaacctggctgcagcgggctcttccggtactgcactgaacaccaaagccatggcttccggtgataccgttaacggtacccagcgccagactcaggctgttggcttcgacgttctgaaaggtaaagtcaccggcggcgcgagcggttctgcttctggtactactccgctggcagatatcgatgcggcaatcaagtctgttgactcccagcgcagcctgctgggtgcgtcccagaaccgtttcgaatccaccatcactaacctgaataacaccgtgagcaacctgtcgtctgc

SEQ ID NO: 20 - DNA, 684 bp, Kosakonia cowanii
  source 1..684: mol_type = genomic DNA
cagaccgctgaaggcgcgctgagcgaagtgaacaacaacctgcagcgtatccgtgacctgaccgttcaggcgcagaacagctccaactccgcatctgacatcgactccatccaggctgaagttaaccagcgtatggaagagatcaaccgcgtaaccacccagaccgacttcaacggcatcaaagtgctgaacaccggtaccggttcaagcagctacagcttccaggttggcgcgaaagataacgaaactatctccatcagcctgaccaagtctgactcctacaacctgtacaacgccactggcgccactgcagcgactaccggccagaccatcaacggcaacaaacgtgccaccgctgctgaaggcttcgacgtactgaaaggtaccgttgatgcgtccggtaaaaccaacggtgctccgctggcagatatcgatgcggccatcaaagcggttgacgatcagcgcagcctgctgggtgcctcccagaaccgtttcgagtccaccatcactaacctgaacaacaccgtgagcaacctgtcagctgcccgcagccgtattcaggactccgactatgcgaccgaagtgtcgaacatgtcccgcgcgcagatcctgcagcaggctggttcttccgtgctggcacaggccaaccaggttccgcagactatgctgtccctgctgcgttaa

SEQ ID NO: 21 - DNA, 309 bp, Kosakonia cowanii
  source 1..309: mol_type = genomic DNA
tactaacaccctgtcgctgatgacacagaacaacctgactaaatcacagtcttctctgggtacttctattgagcgtctttcttccggtctgcgtatcaacagtgcaaaagatgatgctgctggccaggcaattgccaaccgctttacttccaacatcaatggcctgggtgttgctgcccgtaacgccaatgacggtatctccctggcgcagactgctgaaggcgcgctgagcgaagtgaacaacaacctgcagcgtatccgtgacctgaccgttcaggcacagaacagctccaactccgcgtccgatat

SEQ ID NO: 22 - DNA, 906 bp, Kosakonia cowanii
  source 1..906: mol_type = genomic DNA
atggctgttattaatactaacaccctgtcgctgatgacccagaacaacctgactaaatctcagtcttctctgggtacatctattgagcgcctgtcttccggcctgcgtattaacagtgctaaagatgatgccgcgggccaggcaattgccaaccgctttacttctaacatcaatggcctgaccgttgctgcccgtaacgccaacgacggtatctctctggcacagaccgctgaaggcgcgctgagcgaaattaacaacaacctgcagcgtatccgtgacctgaccgttcaggcgcagaacagctccaactccgcgtctgatatcgactccatccaggctgaagttaaccagcgtatggaagaagtgaaccgcgtgaccacacagaccgacttcaacggcatcaaagtgctgaacaccggtaccggttcaagcagctacagcttccaggttggcgcgaaagatagcgaaactatctccatcagcctgaccaagtctgactcctacaacctgtacaatgcgaccggtgcaaccgcagcgactaccggccagaccatcaacggcaacaaacgttctactgccgctgaaggcttcgacgtactgaaaggtactgttgatgcgtccggtaacaccgatggtagcccgctggcggatatcgataaggccatcaaagcggttgacgatcagcgcagcctgctgggtgcctcccagaaccgtttcgagtccaccatcactaacctgaacaacaccgtgagcaacctgtcagcggcccgcagccgtattcaggactccgactatgcgacggaagtgtcgaacatgtcccgcgcgcagatcctgcagcaggccggttctttcgtgctggcacaggccaaccaggttccgcagaccatgctgtccctgctgcgttaa

SEQ ID NO: 23 - DNA, 366 bp, Kosakonia cowanii
  source 1..366: mol_type = genomic DNA
ggcgcgctgagcgaagtgaacaacaacctgcagcgtatccgtgacctgaccgttcaggcgcagaacagctccaactccgcatctgacatcgactccatccaggctgaagttaaccagcgtatggaagagatcaaccgcgtgaccacccagaccgacttcaacggcattaaagtgctgaacaccggtaccggttcaagcagctacagcttccaggtcggttctaaagatagcgaaactatctccatcagcctgaccaagtctgactcctacaacctgtacaatgcgaccggtgcaacggcgcagactaccggccagaccatcaacggcaacaaacgttctactgccgctgaaggcttcgacgtactg

SEQ ID NO: 24 - DNA, 802 bp, Kosakonia cowanii
  source 1..802: mol_type = genomic DNA
atggctgttattaatactaacaccctgtcgctgatgactcagaacaacctgactaaatctcagtcttctctgggcacctctattgagcgcctgtcttctggcctgcgtatcaacagcgcgaaagatgatgctgcgggtcaggccattgccaaccgctttacgtccaacatcaacggcctttccgttgcagcacgtaacgccaacgacggtatttctctctcccagaccgctgaaggcgcgctgggcgaaatcaacaacaacctgcagcgtatccgtgacctgaccgttcaggcacagaacagctccaactctgcgtctgacatcgactccatccaggctgaagttaaccagcgtatggaagaagtgaaccgtgtgacctctcagaccgacttcaacggcatcaaagtgctgaacaccggttccggcaccagcacctataacttccaggtcggcgcgaaagacggcgagaagatcggtatcgacatcagctccagcgacaactacaacctggctgccgcgggctcttccggtactgcactgaacaccaaagccatggcttccggcgacaccatcaacggtacccagcgccagactcaggctgttggtttcgacgtaatgcacggtaaagtgaccggcggcgcgagcggtactgcttccggctccactccgctggctgatatcgatgcggcaatcaagtctgttgactctcagcgcagcctgctgggtgcgtcccagaaccgtttcgaatccaccatcactaacctgaacaacaccgtgagcaacctgtcgtctgcccgcagcc

SEQ ID NO: 25 - DNA, 333 bp, Kosakonia cowanii
  source 1..333: mol_type = genomic DNA
atggctgttatcaataccaataccctgtctctgatgactcagaacaacctgactaaatcacagtcttctctgggcacctctattgagcgtctctcttccggtctgcgtatcaacagtgcaaaagatgatgctgctggtcaggcgatcgctaaccgctttacgtccaacatcaacggcctgtccgttgcagcacgtaacgccaacgacggtatctctctctcccagaccgctgaaggcgcgctgggcgaaatcaacaacaacctgcagcgtatccgtgacctgaccgttcaggcacagaacagctccaactccgcgtctgacatcgactccatc

SEQ ID NO: 26 - DNA, 448 bp, Kosakonia cowanii
  source 1..448: mol_type = genomic DNA
atggaagaagtgaaccgcgtaaccaaccagaccgacttcaacggcatcaaagtgctgaacaccggttccggcaccagcacctataacttccaggtcggttcgaaagacggcgagaagatcggtatcgacatcagctccagcgacagctacaacctggctgccgcgggctcttccggtactgcactgaacaccaaagccatggcttccggtgacaccgttaacggtacccagcgtcagactcaggctgttggcttcgacgttctgaacggtaaagtgaccggcggcgcgagcggttctgcttccggcaccactccgctggctgatatcgatgcggcaatcaagtctgttgactctcagcgcagcctgctgggtgcgtcccagaaccgtttcgaatccaccatcactaacctgaacaacaccgtgagcaacctgtcgtctgcccgcagcc

SEQ ID NO: 27 - DNA, 400 bp, Kosakonia cowanii
  source 1..400: mol_type = genomic DNA
ccgacttcaacggcatcaaagtgctgaacaccggttccggcaccagcacctataacttccaggtcggcgcgaaagacggcgagaagatcggtatcgacatcagctccagcgacagctacaacctggctgcagcgtgctcttccggtactgcactgaacaccaaagccatggcttccggtgacaccgttaacggtacccagcgtcagactcaggctgttggattcgacgttctgaacggtaaagtgaacggcggcgcgagaggttctgcttccggcaccactccgctggctgatatcgatgcggcaatcaagtctgttgactctcagcgcagcctgctgggtgcgtcccagaaccgtttcgaatccaccatcactaacctgaacaacaccgtgagcaacct

SEQ ID NO: 28 - DNA, 301 bp, Kosakonia cowanii
  source 1..301: mol_type = genomic DNA
taaaatctctggagccgcagccggtactgtctatccgctgaaagatatcgacgccgctatcaaagcagttgaatctcagcgtagctccctgggggcgtcccagaaccgtttcgaatctaccatcactaacctgagcaacacggtaatcaacctgtccgcagcgcgcagccgtattcaggattctgcttacgccaccgaagtttcgaacatgtcccgtgcgcagatcctgcagcaggctggttcttctgtgctggcccagcccaaccaggtgccgcagaccatgctgtccctgctgcgttaa

SEQ ID NO: 29 - DNA, 507 bp, Kosakonia cowanii
  source 1..507: mol_type = genomic DNA
atggctgttattaatactaacaccctgtcgctgatgacccagaacaacctgactaaatcacagtcttctctgggtacttctattgagcgtctctcttccggtctgcgtatcaacagtgcaaaagatgatgctgctggtcaggcaattgccaaccgctttacttccaacatcaatggcctgggtgttgctgcccgtaacgccaacgacggtatctccctggcgcagaccgctgaaggcgcgctgagcgaagtgaacaacaacctgcagcgtatccgtgacctgaccgttcaggcacagaacagctccaactccgcatctgacatcgactccatccaggctgaagttaaccagcgtatggaagagatcaaccgcgtgaccacccagaccgacttcaacggcatcaaagtgctgaacaccggtaccggttcaagcagctacagcttccaggttggcgcgaaagataacgaaactatctccatcagcctgaccaagtctgactcctacaac

SEQ ID NO: 30 - DNA, 507 bp, Kosakonia cowanii
  source 1..507: mol_type = genomic DNA
atggctgttattaatactaacaccctgtcgctgatgactcagaacaacctgactaaatctcagtcttctctgggtacatctattgagcgcctgtcttccggcctgcgtattaacagtgctaaagatgatgccgcgggccaggcaattgccaaccgctttacttctaacatcaatggcctgaccgttgcagcgcgtaacgctaacgacggtatctctctggcacagaccgctgaaggcgcgctgagcgaaatcaacaacaacctgcagcgtatccgtgacctgaccgtacaggcgcagaacagctccaactccgcttctgacatcgactccatccaggctgaagttaaccagcgtatggaagaagtgaaccgcgtgaccacccagaccgacttcaacggcatcaaagtgctgaacaccggtaccggttcaagcagctacagcttccaggttggcgcgaaagataacgaaactatctccatcagcctgaccaagtctgactcctacaac

SEQ ID NO: 31 - DNA, 677 bp, Kosakonia cowanii
  source 1..677: mol_type = genomic DNA
atggctgttattaatactaacaccctgtcgctgatgacccagaacaacctgactaaatctcagtcttctctgggcacctcgattgagcgtctctcttccggtctgcgtatcaacagcgcgaaagacgatgctgctggtcaggcgatcgccaaccgctttacttctaacatcaacggcctgaccgttgctgcccgtaacgctaacgacggtatctctctggcacagaccgctgaaggcgcgctgagcgaagtgaacaacaacctgcagcgtatccgtgacctgaccgttcaggcgcagaacagctccaactccgcttctgacatcgactccatccaggctgaagttaaccagcgtatggaagagatcaaccgcgtgaccacccagaccgacttcaacggcatcaaagtgctgaacaccggtacgggctcaagcagctacagcttccaggtcggttctaaagatagcgaaactatctccatcagccttaccaagtctgactcctacaacctgtacaatgcgactggtgcaacggcgcagactaccggccagaccatcaacggcaacaaacgttctactgccgctgaaggcttcgacgtactgaaaggtactgttgatgcgtccggtaacaccgatggcagcccgctggctgatatcgataaggccatcaaagcggttga

SEQ ID NO: 32 - DNA, 906 bp, Kosakonia cowanii
  source 1..906: mol_type = genomic DNA
atggctgttattaatactaacaccctgtcgctgatgacccagaacaacctgactaaatcacagtcttctctgggcacttcgattgagcgtctctcttccggtctgcgtatcaacagtgcaaaagatgatgctgctggtcaggcgatcgccaaccgttttacctctaacatcaatggtcttaccgttgctgcccgtaacgctaacgacggtatctcgctggcacagaccgctgaaggcgcgctgagcgaagtgaacaacaacctgcagcgtatccgtgacctgaccgttcaggcacagaacagctccaactccgcgtccgatatcgactccatccaggctgaagttaaccagcgtatggaagagatcaaccgcgtgaccacccagaccgacttcaacggcatcaaagtgctgaacaccggtaccggttcaagcagctataacttccaggttggttctaaagataacgaaactatctccatcagcctgagcaagtctgactcctacaacctgtataacgccactggtgcaactgcggtaactactacccagaccatcaacggtaacgcgcgttctacttctgctgaaggcttcgacgtactgaaaggtaccgttgactccactggcggtaccaacggtgctccgctggcagatatcgatgctgccatcaaagcggttgacgatcagcgcagcatgctgggtgcgtcccagaaccgtttcgagtccaccattactaacctgaacaacaccgtgagcaacctgtcagcggcccgcagccgtattcaggactccgactacgcgacggaagtgtcgaacatgtcccgcgcgcagatcctgcagcaggccggttcttccgtgctggcgcaggccaaccaggttccgcagaccatgctgtccctgctgcgttaa

SEQ ID NO: 33 - DNA, 301 bp, Kosakonia cowanii
  source 1..301: mol_type = genomic DNA
aaagatctccatcagcctgagctcttccaacgcttacaacctgtacaacgccaccggcgccactgcacagactaccggccagaccatcaacggcaacgcccgtgctactgcagctgaaggcttcgatgtgcttcagggtaccgtaagcagcggcggcaccaccgacggctctccgctggcggatatcgatgcggcgatcaaatcggttgactcccagcgcagcctgctgggtgcgtcccagaaccgtttcgaatccaccatcaccaacctgaacaacaccgtgagcaacctgtcgtctgcc

SEQ ID NO: 34 - DNA, 431 bp, Kosakonia cowanii
  source 1..431: mol_type = genomic DNA
atggctgttatcaatactaacaccctgtcgctcacgactcagaacaacctgactaaatcacagtcttctctgggtaccgctattgagcgtctctcttccggtctgcgtatcaacagtgcaaaagatgatgctgctggtcaggcaatcgctaaccgtttcacctccaacatcaatggcctgggtgttgctgcccgtaacgccaacgacggtatctccctggcacagaccgctgaaggcgcgctgggcgaaatcaacaacaacttacagcgtatccgtgacctgaccgttcaggcacagaacagctccaactctgcgtccgacatcgactccatccaggctgaagttaaccagcgtatggaagaagtgaaccgcgtgaccacccagaccgacttcaacggcatcaaagtgctgaacaccggtaccggcagcag

SEQ ID NO: 35 - DNA, 1254 bp, Kosakonia cowanii
  source 1..1254: mol_type = genomic DNA
atgtcccaggttattaatactaacgcccttagcctcgtcgctcagaacaacctgaacaaatctcaggactctctgggtactgcaattgaacgtctctcttctggtctgcgtattaatagcgcgaaagacgatgcagcaggtcaggcaatctctaaccgtttcaccgccaacatcaacggtctgactcaggcttcccgtaacgccaacgatggtatctccatcgcgcagactactgaaggcgcgctgaacgaaatcaacgacaacctgcagaacatccgtcgtctgtccgtacaggcacagaacggcaccaactctgattctgaccgtcagtccatccaggacgaaatcgacgcgcgtctggacgagatcaaccgtatctctgaacagaccgagttcaacggcgtgaaagtactgagcaaagaccagaagctctctatccaggttggttctaacgatggtcagactatcgatatcgaactgaaccagatggactcttctactctgggtatggacggcttcagcgtagctaacggcattgacactactactctgactgcaagcaccggtacagtgaaagttgacagtggtttcgactacgatgcagctaaattcaccgacggtggcgcgaccgcagtaaccagcatcgacgatatcgtagttgacgataacggcgacgtgtttgcagtgaaaggcgctgaaatgtacgccgtaaccgaagatccgactactggtgaaatctccttcaactccgataacgacgttgccagctctgttgtaggcacaccgaccagcgttgttggtgaagatatgatgaaagatcagactgttgatatgaccggtatcacaggtacgttaatggaagatggccagggtaactactatgttgacgatggtgccggcaacctgactgaagcgactattgataccactacctggactgcaacggataccggtaaagctgtttctactactccggcaacttccgatccgctgaccaaaatcgacgaagcgctggcgcaggttgatgaaatgcgttccggtctgggtgcggtacagaaccgtttcgcgtctgttatcagcaaccttaacaacaccgttaacaacctgtctgaatcccgctctcgtattctggatgctgacttcgcgtctgaagtatctgaaatgagccgcgcgaacattctgcagtctgcaggcaccaccgtgctggcacaggctaaccaggttccgcagaacgtgctgtccctgctgggctaa

SEQ ID NO: 36 - DNA, 482 bp, Kosakonia cowanii
  source 1..482: mol_type = genomic DNA
cctgcagcgtatccgtgacctgaccgttcaggcacagaacagctccaactccgcgtccgacatcgactccatccaggctgaagttaaccagcgtatggaagaagtgaaccgcgtgaccacccagaccgacttcaacggcattaaagtgctgaacaccggtaccggcaccagcagctacagcttccaggttggcgcgaaagataacgaaactatttctatcggcctgagctcttccaacgcttacaacctgtacaacgccaccggcgccactgcacagactaccggccagaccatcaacggtaacgcccgtgctactgcagctgaaggcttcgatgtgcttaagggtacagtaagcagcggcggcgctaccgacggctctccgctggcggatatcgatgcggcgatcaaatcggttgactcccagcgcagcctgctgggtgcgtcccagaaccgtttcgaatccaccatcaccaacctgaaca

SEQ ID NO: 37 - DNA, 401 bp, Kosakonia cowanii
  source 1..401: mol_type = genomic DNA
atggctgttattaatactaacaccctgtcgctgacgacccagaacaacctgactaaatcacagtcttctctgggtactgctattgagcgtctctcttccggtctgcgtatcaacagtgcaaaagatgatgctgctggtcaggcaatcgccaaccgctttacttccaacatcaatggcctgggtgttgctgcccgtaacgccaacgacggtatctccctggcacagaccgctgaaggcgcgctgggcgaaatcaacaacaacctgcagcgtatccgtgacctgaccgttcaggcacagaacagctccaactccgcgtccgacatcgactccatccaggctgaagttaaccagcgtatggaagaagtgaaccgcgtgaccacccagaccgacttcaacggcat

SEQ ID NO: 38 - DNA, 924 bp, Kosakonia cowanii
  source 1..924: mol_type = genomic DNA
atgcgtcttagcacaagttatatttttcaaaaccgcatagacagcctgggcgacgcgatgacgggttacaacgacctggcgacccgcctctctgctggccagacgctgctgaagccctctgacgatccgaccggcgcgtcgcagtctgtcaccttacaaacggcgctgtcgcgcatgagccagttcgacaccgcgcgcacctacgcgcaggatgcgctgggccaggaagataacaccctggactctatcggcaacttgctgacagagaacctgacgcagaaagtgatcgccggtggtaacggtgcctactctgacgaagatcgcgccgcgctggcggaagagttacagggcatccgcgataacctactggatctggcgaacaccaaaaacagcgacgggcgttatatttttgccgggtataaaaccggtagcgcgccgttccaggccgatggcagctatgtcggcggcgatacggccatgacgcaggtggtctccgacagcaccgaaatgcaggtcggtcataccggttcagaggtgtttctgagcggcacgccggacgatctgtttcaagccctcgacagtgcgattgcgcaactgaaacagccggtcaccagcgatgcggacagggatgcgctgcaaggagtgctggatgatgccaatatcagcatcaagaaaaatattgataacctcggcaaggttcgcgccaccgtcggtaccaatatgcagcagattgaatcgctgggattcagcgctgagtcacaaagcatcaatgtgcagagccgtctgcaggaaacgttaggttcggactgggactcgatgattaccctgttatctcagtcaaagatgtctgagttcgcgcttaattcctccatgacggtatttcagtcgatgcagcagctctctatttttaaagtaatgggttga

SEQ ID NO: 39 - DNA, 909 bp, Kosakonia cowanii
  source 1..909: mol_type = genomic DNA
atggccgtcatcaataccaatacgctgtcactcatcaaccaaaataaccttaataaatcccaggcggcgcaaagctctgcaattcagcgtttatcctccggcctgcgtattaatagtgcgaaagatgatgctgcgggccaggcaattgccaaccgtttctcttccagcattagcggtatgggcgtggccgcaagaaatgccaacgatgctatttcgctggcacaaacggctgaaggtgcattaagcgaaatcaataacaacttgcagcgtatccgcgatctggccgtgcaggcgcaaaacagcactaactctgcctccgatgtcgactctattcagtcggaagtgaatgagcgtatggccgagattaaccgcgtgaccctgcagactgatttcaacggtatcaaaattctcaataccagctccggtacggccagttacggcttccatgtagggacagatgatggcgaagagattgttatcacgatgagcagcagcgatgactacaacctgggggcaaattccggttcgattggccaggtctctggcgaattcattcacggcaatgcacgcagcgtaaaagcagtcggctttgatgtgctccatggcaccgtcacccccttcagcggtgcgatactcaataatccccttgccgccattgacgatgcgataaaagccgtcgatacccaacgcagttcgctcggggcatttcagaaccgctttgaatcgacgatcaataaccttaatcaggcggcgacgaatctttccgccgcgcgcagccgaatcaatgacgccgactatggcacggaagtgtcgaatatgagcagggcgcagatattacaacaggccggctcgtctgtgctggcgcaggccaaccaggtgccgcagaccatgctgtcgctgctgcgttaa

SEQ ID NO: 40 - DNA, 1254 bp, Kosakonia cowanii
  source 1..1254: mol_type = genomic DNA
atgtcccaggttattaatactaacgcccttagcctcgtcgctcagaacaacctgaacaaatctcaggactctctgggtactgcaattgaacgtctctcttctggtctgcgtattaatagcgcgaaagacgatgcagcaggtcaggcgatctctaaccgtttcaccgccaacatcaacggtctgactcaggcttcccgtaacgccaacgatggtatctccatcgcgcagaccactgaaggcgcgctgaacgaaatcaacgacaacctgcagaacatccgtcgtctgtccgtacaggcacagaacggcaccaactccgattctgaccgtcagtccatccaggacgaaatcgatgcgcgtctggacgagatcaaccgtatctctgaacagaccgagttcaacggcgtgaaagtactgagcaaagaccagaagctctctatccaggttggttctaacgatggccagactatcgatatcgaactgaaccagatggactcttctactctgggtatggacggcttcagcgtagctaacggcattgacactactactctgactgcaagcaccggtacagtgaaagttgacagtggtttcgactacgatgcagctaaattcaccgacagtggcgcgaccgcagcaaccagcatcgacgatatcgtggttgatgataacggcgacgtgtttgcagtgaaaggcgctgaaatgtacgccgtaaccgaagatccgactactggtgaaatctccttcaactccgataacgacgttgccagctctgttgtgggcacaccgaccagcgttgttggtgaagatatgatgaaagaccaggctattaacatgaccggtatcaccggtacgttaatggaagatggtaaaggtaactactacgttgacgacggtgccggcaacctgactgaagcgactattgataccactacctggactgcaacggataccggtaaagctgtttctactactccggcaacttccgatccgctgaccaaaatcgacgaagcgctggcgcaggttgatgaaatgcgttccggtctgggtgcggtacagaaccgtttcgcgtctgttatcagcaacctgaacaacaccgttaacaacctgtctgaatctcgctctcgtattctggatgctgacttcgcgtctgaagtatctgaaatgagccgcgcaaacattctgcagtctgcaggcaccaccgtgctggcacaggctaaccaggttccgcagaacgtgctgtccctgctgggctaa

SEQ ID NO: 41 - DNA, 906 bp, Kosakonia cowanii
  source 1..906: mol_type = genomic DNA
atggctgttattaatactaacaccctgtcgctgatgactcagaacaacctgactaaatctcagtcttctctgggtacatctattgagcgcctgtcttccggcctgcgtattaacagtgctaaagatgatgccgcgggccaggcaattgccaaccgctttacttctaacatcaatggcctgaccgttgctgcccgtaacgccaacgacggtatctctctggcacagaccgctgaaggcgcgctgagcgaaattaacaacaacctgcagcgtatccgtgacctgaccgttcaggcgcagaacagctccaactccgcgtctgacatcgactccatccaggctgaagttaaccagcgtatggaagaagtgaaccgcgtgaccacccagaccgacttcaacggcatcaaagtgctgaacaccggtaccggttcaagcagctacagcttccaggttggcgcgaaagatagcgaaactatctccatcagcctgaccaagtctgactcctacaacctgtacaatgcgaccggcgcaaccgcagcgactaccggccagaccatcaacggcaacaaacgttctactgccgctgaaggcttcgacttactgaaaggtactgttgatgcgtccggtaacaccgatggtagcccgctggcggatatcgataaggccatcaaagcagttgacgatcagcgcagcctgctgggtgcctcccagaaccgtttcgagtccaccatcactaacctgaacaacaccgtgagcaacctgtcagcggcacgcagccgtattcaggactccgactatgcgacggaagtgtcgaacatgtcccgcgcgcagatcctgcaacaggctggttcttccgtgctggcgcaggccaaccaggttccgcagactatgctgtccctgctgcgttaa

SEQ ID NO: 42 - DNA, 832 bp, Kosakonia cowanii
  source 1..832: mol_type = genomic DNA
atggctgttattaatactaacaccctgtcgctgatgacccagaacaacctgactaaatcacagtcttctctgggcacctcgattgagcgtctctcttccggtctgcgtatcaacagtgcaaaagatgatgctgctggtcaggcgatcgccaaccgtttcacctctaacatcaatggtcttaccgttgctgcccgtaacgccaatgacggtatctccctggcgcagactgctgaaggcgcgctgagcgaagtgaacaacaacctgcagcgtatccgtgacctgaccgttcaggcacagaacagctccaactccgcgtccgatatcgactccatccaggctgaagttaaccagcgtatggaagagatcaaccgcgtgaccacccagaccgacttcaacggcattaaagtgctgaacaccggtaccggttcaagcagctataacttccaggttggttctaaagataacgaaactatctccatcagcctgagcaagtctgactcctacaatctgtataacgccactggtgcaactgcggtaaccaccacccagaccatcaacggtaacgcacgttctacttctgctgaaggcttcgacgtactgaaaggtaccgttgactccactggcggtaccaacggtgctccgctggcagatatcgatgcggccatcaaagcagttgacgatcagcgcagcatgctgggtgcctcccagaaccgtttcgagtccaccatcactaacctgaacaacaccgtgagcaacctgtcagctgcccgcagccgtattcaggactccgactatgcgaccgaagtgtcgaacatgtcccgcgcgcagatcc

SEQ ID NO: 43 - DNA, 542 bp, Kosakonia cowanii
  source 1..542: mol_type = genomic DNA
cagaccgctgaaggcgcgctgagcgaagtgaacaacaacctgcagcgtatccgtgacctgaccgttcaggcgcagaacagctccaactccgcatctgacatcgactccatccaggctgaagttaaccagcgtatggaagagatcaaccgcgtgaccacccagaccgacttcaacggcattaaagtgctgaacaccggtaccggttcaagcagctacagcttccaggtcggttctaaagatagcgaaactatctccatcagcctgaccaagtctgactcctacaacctgtacaatgcgactggtgcaacagcgcagactaccggccagaccatcaacggcaacaaacgttctactgccgctgaaggcttcgacgtactgaaaggtactgttgatgcgtccggtagcaccgatggcagcccgctggcagatatcgataaggccatcaaagcggttgacgatcagcgcagcctgctgggtgcctcccagaaccgtttcgagtccaccatcactaacctgaacaacaccgtgagcaacctgtcagc

SEQ ID NO: 44 - DNA, 457 bp, Kosakonia cowanii
  source 1..457: mol_type = genomic DNA
accacccagaccgacttcaacggcatcaaagtgctgaacaccggtaccggttcaagcagctacagcttccaggttggcgcgaaagataacgaaactatctccatcagcctgaccaagtctgactcctacaacctgtacaacgccactggcgccactgcagcgactaccggccagaccatcaacggcaacaaacgtgccaccgctgctgaaggcttcgacgtactgaaaggtaccgttgatgcgtccggtaaaaccaacggtgctccgctggcagatatcgatgcggccatcaaagcggttgacgatcagcgcagcctgctgggtgcctcccagaaccgtttcgagtccaccatcactaacctgaacaacaccgtgagcaacctgtcagctgcccgcagccgtattcaggactccgactatgcgaccgaagtgtcgaacatgtcccgcgcgcagatcc

SEQ ID NO: 45 - DNA, 924 bp, Kosakonia cowanii
  source 1..924: mol_type = genomic DNA
atgcgtcttagcacaagttatatttttcaaaaccgcatagacagcctgggcgacgcgatgacgggttacaacgacctggcgacccgcctctctgctggccagacgctgctgaagccctctgacgatccaaccggcgcgtcgcagtctgtcactttacaaacggcgctgtcgcgcatgagccagttcgacaccgcgcgcacctacgcgcaggatgcgctgggccaggaagataacaccctggactctatcggcaacttgctgacagagaacctgacgcagaaagtgattgccggtggtaacggtgcttactctgacgaagatcgcgccgcgctggcggaagagttacagggcatccgcgataacctgctggatctggcgaacaccaaaaacagcgacggtcgctacatttttgccggctataaaaccggcagcgcgccgttccaggccgatggcacctatgtcggcggcgataccgccatgacgcaggtggtctctgacagcaccgaaatgcaggtcggtcataccggctcagaggtgtttatgagcggcacgccggacgatctgtttgaagccctcgacaacgcgattgcgcagttgaaacagccggtcaccagcgatgccgacagggacgcgctgcaggctgtgctggatgattccaatgtcagcatcaagaagaatattgataacctcggcaaggtgcgcgccaccgtcggtaccaatatgcagcagattgaatcgctgggattcagcgctgaggctcaaagcatcaatgtgcagagccgcctgcaggaaaccttaggttcggactgggactcgatgattaccctgttatcccagtcaaagatgtcggaattcgcgcttaattcttccatgacggtatttcagtcaatgcagcagctctctattttcaaagtaatgggttga

SEQ ID NO: 46 - DNA, 516 bp, Kosakonia cowanii
  source 1..516: mol_type = genomic DNA
atggctgttattaatactaacaccctgtcgctgatgactcagaacaacctgactaaatctcagtcttctctgggtacatctattgagcgcctgtcttccggcctgcgtattaacagtgctaaagatgatgccgcgggccaggcaattgccaaccgctttacttctaacatcaatggcctgaccgttgcagcgcgtaacgctaacgacggtatctctctggcacagaccgctgaaggcgcgctgagcgaaatcaacaacaacctgcagcgtatccgtgacctgaccgtacaggcgcagaacagctccaactccgcgtctgacatcgactccatccaggctgaagttaaccagcgtatggaagaagtgaaccgcgtgaccacccagaccgacttcaacggcatcaaagtgctgaacaccggtaccggttcaagcagctacagcttccaggttggcgcgaaagataacgaaactatctccatcagcctgaccaagtctgactcctacaacctgtacaat

SEQ ID NO: 47 - DNA, 516 bp, Kosakonia cowanii
  source 1..516: mol_type = genomic DNA
atggctgttattaatactaacaccctgtcgctgatgacccagaacaacctgactaaatcacagtcttctctgggtacttctattgagcgtctctcttccggtctgcgtatcaacagtgcaaaagatgatgctgctggtcaggcaatcgccaaccgctttacttccaacatcaatggcctgggtgttgctgcccgtaacgccaacgacggtatctctctggcgcagaccgctgaaggcgcgctgagcgaagtgaacaacaacctgcagcgtatccgtgacctgaccgttcaggcacagaacagctccaactccgcatctgacatcgactccatccaggctgaagttaaccagcgtatggaagagatcaaccgcgtaaccacccagaccgacttcaacggcatcaaagtgctgaacaccggtaccggttcaagcagctacagcttccaggttggcgcgaaagataacgaaactatctccatcagcctgaccaagtctgactcctacaacctgtacaat

SEQ ID NO: 48 - DNA, 604 bp, Kosakonia cowanii
  source 1..604: mol_type = genomic DNA
atggctgttattaatactaacaccctgtcgctgatgacccagaacaacctgactaaatctcagtcttctctgggcacctcgattgagcgtctctcttccggtctgcgtatcaacagcgcgaaagacgatgctgctggtcaggcgatcgccaaccgctttacttctaacatcaacggcctgaccgttgctgcccgtaacgctaacgacggtatctctctggcacagaccgctgaaggcgcgctgagcgaagtgaacaacaacctgcagcgtatccgtgacctgaccgttcaggcgcagaacagctccaactccgcttctgacatcgactccatccaggctgaagttaaccagcgtatggaagagatcaaccgcgtgaccacccagaccgacttcaacggcatcaaagtgctgaacaccggtacgggctcaagcagctacagcttccaggtcggttctaaagatagcgaaactatctccatcagcctgaccaagtctgactcctacaacctgtacaatgcgactggtgcaacggcgcagactaccggccagaccatcaacggcaacaaacgttctactgccgctgaaggcttcgacgtactgaaag

SEQ ID NO: 49 - DNA, 906 bp, Kosakonia cowanii
  source 1..906: mol_type = genomic DNA
atggctgttattaatactaacaccctgtcgctgatgacccagaacaacctgactaaatcacagtcttctctgggcacctcgattgagcgtctctcttccggtctgcgtatcaacagtgcaaaagatgatgctgctggtcaggcgatcgccaaccgttttacctctaacatcaatggtcttaccgttgctgcccgtaacgctaacgacggtatctcgctggcacagaccgctgaaggcgcgctgagcgaagtgaacaacaacctgcagcgtatccgtgacctgaccgttcaggcacagaacagctccaactccgcgtccgatatcgactccatccaggctgaagttaaccagcgtatggaagagatcaaccgcgtgaccacccagaccgacttcaacggcatcaaagtgctgaacaccggtaccggttcaagcagctataacttccaggttggttctaaagataacgaaactatctccatcagcctgagcaagtctgactcctacaacctgtataacgccactggtgcaactgcggtaactacttcccagaccatcaacggtaacgcgcgttctacttctgctgaaggcttcgacgtactgaaaggtaccgtcgactccactggcggtaccaacggtgctccgctggcagatatcgatgcggccatcaaagcggttgacgatcagcgcagcatgctgggtgcgtcccagaaccgtttcgagtccaccattactaacctgaacaacaccgtgagcaacctgtcagcggcccgcagccgtattcaggactccgactatgcgaccgaagtgtcgaacatgtcccgcgcgcagatcctgcagcaggccggttcttccgtgctggcgcaggccaaccaggttccgcagaccatgctgtccctgctgcgttaa

SEQ ID NO: 50 - DNA, 909 bp, Kosakonia cowanii
  source 1..909: mol_type = genomic DNA
atggccgtcatcaataccaatacgctgtcactcatcaaccaaaataaccttaataaatcccaggcggcgcaaagctctgcaattcagcgtttatcctcaggtctgcgtattaacagcgcgaaagatgacgctgcgggccaggcgattgccaaccgtttctcctccagcattaacggcatgggcgtggccgcaagaaatgccaacgatgctatttcgctggcacaaacggctgaaggcgcattaagcgaaataaataacaacttgcagcgtatccgcgatctggccgtgcaggcgcaaaacagcactaactctgcctccgatgtcgactctattcagtcggaagtgaacgagcgtatggccgagattaaccgcgtaactctccagacagattttaatggcatcaaaattctcaataccagctccggtgcggccagttacggcttccatgtagggacagatgatggcgaagagattgttatcacgatgagtagcagtgatgattacaacctgggggcaaattccggttcgattggccaggtctctggcgaatttattcacggcaatgcacgcagcgtaaaagcaatcggctttgatgtgctccatggcaccgtcaccccctttagcggtgcgatactcaataatccccttgccgccattgacgatgcgataaaagccgtcgatacccaacgtagttcgctcggggcatttcagaaccgctttgaatcgacgatcaataaccttaaccaggcggcgacgaatctttccgccgcgcgcagccgaataaatgacgccgactatggcacggaggtctcaaatatgagcagggcgcaaatattacaacaggccggctcgtccgtgctggcgcaggccaaccaggtgccgcagaccatgctgtcgctgctgcgttaa

SEQ ID NO: 51 - DNA, 610 bp, Kosakonia cowanii
  source 1..610: mol_type = genomic DNA
cgtaacgccaacgacggtatctctctctcccagaccgctgaaggcgcgctgggcgaaatcaacaacaacctgcagcgtatccgtgacctgaccgttcaggcacagaacagctccaactccgcgtctgacatcgactccatccaggctgaagttaaccagcgtatggaagaagtgaaccgcgtaaccaaccagaccgacttcaacggcatcaaagtgctgaacaccggttccggcaccagcacctataacttccaggtcggcgcgaaagacggcgagaagatcggtatcgacatcagctccagcgacagctacaacctggctgcagcgggctcttccggtactgcactgaacaccaaagccatggcttccggtgacaccgttaacggtacccagcgtcagactcaggctgttggcttcgacgttctgaacggtaaagtgaccggcggcgcgagcggttctgcttccggcaccactccgctggctgatatcgatgcggcaatcaagtctgttgactctcagcgcagcctgctgggtgcgtcccagaaccgtttcgaatccaccatcactaacctgaacaacaccgtgagcaacctgtcgtctgcccgcagcc

SEQ ID NO: 52 - DNA, 661 bp, Kosakonia cowanii
  source 1..661: mol_type = genomic DNA
atggctgttattaatactaacaccctgtcgctgatgactcagaacaacctgactaaatctcagtcttctctgggcacctctattgagcgcctgtcttctggcctgcgtatcaacagcgcgaaagatgatgctgcgggtcaggccattgccaaccgctttacgtccaacatcaacggcctttccgttgcagcacgtaacgccaacgacggtatttctctctcccagaccgctgaaggcgcgctgggcgaaatcaacaacaacctgcagcgtatccgtgacctgaccgttcaggcacagaacagctccaactctgcgtctgacatcgactccatccaggctgaagttaaccagcgtatggaagaagtgaaccgtgtgacctctcagaccgacttcaacggcatcaaagtgctgaacaccggttccggcaccagcacctataacttccaggtcggcgcgaaagacggcgagaagatcggtatcgacatcagctccagcgacaactacaacctggctgccgcgggctcttccggtactgcactgaacaccaaagccatggcttccggcgacaccatcaacggtacccagcgccagactcaggctgttggtttcgacgtaatgcacggtaaagtgaccggcggcgcgagcggtactgcttccggct

SEQ ID NO: 53 - DNA, 906 bp, Kosakonia cowanii
  source 1..906: mol_type = genomic DNA
atggctgttattaatactaacaccctgtcgctgatgacccagaacaacctgactaaatcacagtcttctctgggcacctcgattgagcgtctctcttccggtctgcgtatcaacagcgcgaaagacgatgctgctggtcaggcgatcgcgaaccgctttacttctaacatcaacggcctgaccgttgctgcccgtaacgctaacgacggtatctctctggcacagaccgctgaaggcgcgctgagcgaagtgaacaacaacctgcagcgtatccgtgacctgaccgttcaggcgcagaacagctccaactccgcatctgacatcgactccatccaggctgaagttaaccagcgtatggaagagatcaaccgcgtgaccacccagaccgacttcaacggcattaaagtgctgaacaccggtaccggttcaagcagctacagcttccaggtcggttctaaagatagcgaaactatctccatcagcctgaccaagtctgactcctacaacctgtacaatgcgaccggtgcaacggcgcagactaccggccagaccatcaacggcaacaaacgttctactgccgctgaaggcttcgacgtactgaaaggtactgttgatgcgtccggtaacaccgatggtagcccgctggcggatatcgataaggccatcaaagcggttgacgatcagcgcagcctgctgggtgcctcccagaaccgtttcgagtccaccatcactaacctgaacaacaccgtgagcaacctgtcagcggcccgcagccgtattcaggactccgactatgcgacggaagtgtcgaacatgtcccgcgcgcagatcctgcagcaggccggttcttccgtgctggcacaggccaaccaggttccgcagaccatgctgtccctgctgcgttaa

SEQ ID NO: 54 - DNA, 906 bp, Kosakonia cowanii
  source 1..906: mol_type = genomic DNA
atggctgttattaatactaacaccctgtcgctgatgacccagaacaacctgactaaatctcagtcttctctgggtacatctattgagcgcctgtcttccggcctgcgtattaacagtgctaaagatgatgccgcgggccaggcaattgccaaccgctttacttctaacatcaatggcctgaccgttgctgcccgtaacgccaacgacggtatctctctggcacagaccgctgaaggcgcgctgagcgaaattaacaacaacctgcagcgtatccgtgacctgaccgttcaggcgcagaacagctccaactccgcgtctgatatcgactccatccaggctgaagttaaccagcgtatggaagaagtgaaccgcgtgaccacacagaccgacttcaacggcatcaaagtgctgaacaccggtaccggttcaagcagctacagcttccaggttggcgcgaaagataacgaaactatctccatcagcctgaccaagtctgactcctacaacctgtacaacgccactggcgccactgcagcgactaccggccagaccatcaacggcaacaaacgtgccaccgctgctgaaggcttcgacgtactgaaaggtaccgttgatgcgtccggtaaaaccaacggtgctccgctggcagatatcgatgcggccatcaaagcggttgacgatcagcgcagcctgctgggtgcctcccagaaccgtttcgagtccaccatcactaacctgaacaacaccgtgagcaacctgtcagctgcccgcagccgtattcaggactccgactatgcgaccgaagtgtcgaacatgtcccgcgcgcagatcatccagcaggctggtacttccgtgctggcacaggccaaccagtttcctcagactaacctgtccctgctgcgttaa

SEQ ID NO: 55 - DNA, 865 bp, Kosakonia cowanii
  source 1..865: mol_type = genomic DNA
atggctgttattaatactaacaccctgtcgctgatgactcagaacaacctgactaaatctcagtcttctctgggtacatctattgagcgcctgtcttccggcctgcgtattaacagtgctaaagatgatgccgcgggccaggcaattgccaaccgctttacttctaacatcaatggcctgaccgttgctgcccgtaacgccaacgacggtatctctctggcacagaccgctgaaggcgcgctgagcgaaattaacaacaacctgcagcgtatccgtgacctgaccgttcaggcgcagaacagctccaactccgcgtctgacatcgactccatccaggctgaagttaaccagcgtatggaagaagtgaaccgcgtgaccacccagaccgacttcaacggcatcaaagtgctgaacaccggtaccggttcaagcagctacagcttccaggttggcgcgaaagatagcgaaactatctccatcagcctgaccaagtctgactcctacaacctgtacaatgcgaccggcgcaaccgcagcgactaccggccagaccatcaacggcaacaaacgttctactgccgctgaaggcttcgacgtactgaaaggtactgttgatgcgtccggtaacaccgatggtagcccgctggcagatatcgataaggccatcaaagcggttgactatcagcgcagcctgctgggtgcgtcccagaaccgtttcgagtccaccatcactaacctggacaacaccgtgtgcaacctgtcagcggcccgcagccgtcttcaggactccgactacgcgaccgatttgtcgaacatgtgccgcgcgcagatcctgcagctggccgggtcttccgtgctggcactgg

SEQ ID NO: 56 - DNA, 374 bp, Kosakonia cowanii
  source 1..374: mol_type = genomic DNA
atggctgttattaatactaacaccctgtcgctgatgacccagaacaacctgactaaatcacagtcttctctgggtacttctattgagcgtctctcttccggtctgcgtatcaacagtgcaaaagatgatgctgctggtcaggcaatcgccaaccgctttacttccaacatcaatggcctgggtgttgctgcccgtaacgccaacgacggtatctctctggcgcagaccgctgaaggcgcgctgagcgaagtgaacaacaacctgcagcgtatccgtgacctgaccgttcaggcacagaacagctccaactccgcatctgacatcgactccatccaggctgaagttaaccagcgtatggaagagatcaaccgcgt

SEQ ID NO: 57 - DNA, 673 bp, Kosakonia cowanii
  source 1..673: mol_type = genomic DNA
aggcgcgctgagcgaagtgaacaacaacctgcagcgtatccgtgacctgaccgttcaggcgcagaacagctccaactccgcatctgacatcgactccatccaggctgaagttaaccagcgtatggaagagatcaaccgcgtgaccacccagaccgacttcaacggcattaaagtgctgaacaccggtaccggttcaagcagctacagcttccaggttggttctaaagatagcgaaactatctccatcagcctgaccaagtctgactcctacaacctgtacaatgcgactggtgcaacagcgcagactaccggccagaccatcaacggcaacaaacgttctactgccgctgaaggcttcgacgtactgaaaggtactgttgatgcgtccggtagcaccgatggcagcccgctggcagatatcgataaggccatcaaagcggttgacgatcagcgcagcctgctgggtgcctcccagaaccgtttcgaatccaccatcactaacctgaacaccaccgagagcaacctgtcagctgcccgcagccgtattcaggactccgactatgcgacggaagtgtcgaacatgtcccgcgcgcagatcctgcagcaggccggttcttccgtgctggcacaggccaaccaggttccgcagaccatgctgtccctgctgcgttaa

SEQ ID NO: 58 - DNA, 909 bp, Kosakonia cowanii
  source 1..909: mol_type = genomic DNA
atggccgtcatcaataccaatacgctgtcactcatcaaccaaaataaccttaataaatcccaggcggcgcaaagctctgcaattcagcgtttatcctccggcctgcgtattaatagtgcgaaagatgatgctgcgggccaggcaattgccaaccgtttctcttccagcattagcggtatgggcgtggccgcaagaaatgccaacgatgctatttcgctggcacaaacggctgaaggtgcattaagcgaaatcaataacaacttgcagcgtatccgcgatctggccgtgcaggcgcaaaacagcactaactctgcctccgatgtcgactctattcagtcggaagtgaatgagcgtatggccgagattaaccgcgtgaccctgcagactgatttcaacggtatcaaaattctcaataccagctccggtacggccagttacggcttccatgtagggacagatgatggcgaagagattgttatcacgatgagcagcagcgatgactacaacctgggggcaaattccggttcgattggccaggtctctggcgaattcattcacggcaatgcacgcagcgtaaaagcagtcggctttgatgtgctccatggcaccgtcaccccctttagcggtgcgatactcaataatccgcttgccgccattgacgatgcgataaaagccgtcgatacccaacgcagttcgctcggggcatttcagaaccgctttgaatcgacgatcaataaccttaatcaggcggcgacgaatctttccgccgcgcgcagccgaatcaatgacgccgactatggcacggaagtgtcgaatatgagcagggcgcagatattacaacaggccggctcgtctgtgctggcgcaggccaaccaggtgccgcagaccatgctgtcgctgctgcgttaa

SEQ ID NO: 59 - DNA, 678 bp, Kosakonia cowanii
  source 1..678: mol_type = genomic DNA
gctgaaggcgcgctgagcgaagtgaacaacaacctgcagcgtatccgtgacctgaccgttcaggcgcagaacagctccaactccgcgtccgatatcgactccatccaggctgaagttaaccagcgtatggaagagatcaaccgcgtgaccacccagaccgacttcaacggcatcaaagtgctgaacaccggtaccggttcaagcagctataacttccaggttggttctaaagataacgaaactatctccatcagcctgagcaagtctgactcctacaacctgtataacgccactggtgcaactgcggtaactaccacccagaccatcaacggtaacgcgcgttctacttctgctgaaggcttcgacgtactgaaaggtaccgttgactccactggcggtaccaacggtgctccgctggcagatatcgatgcggccatcaaagcagttgacgatcagcgcagcatgctgggtgcctcccagaaccgtttcgaatccaccatcactaacctgaacaacaccgtgagcaacctgtcagctgcccgcagccgtattcaggactccgactacgcgacggaagtgtcgaacatgtcccgcgcgcagatcctgcagcaggctggttcttctgtgctggcgcaggccaaccaggttccgcagaccatgctgtccctgctgcgttaa

SEQ ID NO: 60 - DNA, 673 bp, Kosakonia cowanii
  source 1..673: mol_type = genomic DNA
aggcgcgctgagcgaagtgaacaacaacctgcagcgtatccgtgacctgaccgttcaggcgcagaacagctccaactccgcatctgacatcgactccatccaggctgaagttaaccagcgtatggaagagatcaaccgcgtaaccacccagaccgacttcaacggcatcaaagtgctgaacaccggtaccggttcaagcagctacagcttccaggttggcgcgaaagataacgaaactatctccatcagcctgaccaagtctgactcctacaacctgtacaacgccactggcgccactgcagcgactaccggccagaccatcaacggcaacaaacgtgccaccgctgctgaaggcttcgacgtactgaaaggtaccgttgatgcgtccggtaaaaccaacggtgctccgctggcagatatcgatgcggccatcaaagcggttgacgatcagcgcagcctgctgggtgcctcccagaaccgtttcgagtccaccatcactaacctgaacaacaccgtgagcaacctgtcagctgcccgcagccgtattcaggactccgactatgcgaccgaagtgtcgaacatgtcccgcgcgcagatcctgcagcaggctggttcttccgtgctggcgcaggccaaccaggttccgcagactatgctgtccctgctgcgttaa

SEQ ID NO: 61 - DNA, 899 bp, Kosakonia cowanii
  source 1..899: mol_type = genomic DNA
atggctgttattaatactaacaccctgtcgctgatgactcagaacaacctgactaaatctcagtcttctctgggtacatctattgagcgcctgtcttccggcctgcgtattaacagtgctaaagatgatgccgcgggccaggcaattgccaaccgctttacttctaacatcaatggcctgaccgttgctgcccgtaacgccaacgacggtatctctctggcacagaccgctgaaggcgcgctgagcgaaattaacaacaacctgcagcgtatccgtgacctgaccgttcaggcgcagaacagctccaactccgcgtctgacatcgactccatccaggctgaagttaaccagcgtatggaagaagtgaaccgcgtgaccacccagaccgacttcaacggcatcaaagtgctgaacaccggtaccggttcaagcagctacagcttccaggttggcgcgaaagatagcgaaactatctccatcagcctgaccaagtctgactcctacaacctgtacaatgcgaccggtgcaaccgcagcgactcccggccagaccatcaacggcaataaacgttctactgccgctgaaggcttcgacgtactgaaaggtactgttgatgcgtccggtaacaccgatggtagcccgctggcggatatagacaaggccatcaaagcggttgacgatcagcgcagcctgctgggtgcctcccagaaccgtttcgaatccaccatcactaacctgaacaacaccgtgagcaacctgtcagctgcccgcagccgtatccaggactccgactatgcgaccgaagtgtcgaacatgtcccgcgcgcagatcctgcagcaggctggttcttccgtgctggcgcaggccaaccaggttccgcagactatgctgtccctgct

SEQ ID NO: 62 - DNA, 1254 bp, Kosakonia cowanii
  source 1..1254: mol_type = genomic DNA
atgtcccaggttattaatactaacgcccttagcctcgtcgctcagaacaacctgaacaaatctcaggactctctgggtactgcaattgaacgtctctcttctggtctgcgtattaatagcgcgaaagacgatgcagcaggtcaggcgatctctaaccgtttcaccgccaacatcaacggtctgactcaggcttcccgtaacgccaacgatggtatctccatcgcgcagaccactgaaggcgcgctgaacgaaatcaacgacaacctgcagaacatccgtcgtctgtccgtacaggcacagaacggcaccaactccgattctgaccgtcagtccatccaggacgaaatcgacgcgcgtctggacgagatcaaccgtatctctgaacagaccgagttcaacggcgtgaaagtactgagcaaagaccagaagctctctatccaggttggttctaacgatggccagactatcgatatcgaactgaaccagatggactcttctactctgggtatggacggcttcagcgtagctaacggcattgacactactactctgactgcaagcaccggtacagtgaaagttgacagtggtttcgactacgatgcagctaaattcaccgacagtggcgcgaccgcagcaaccagcatcgacgatatcgtggttgatgataacggcgacgtgtttgcagtgaaaggcgctgaaatgtacgccgtaaccgaagatccgactactggtgaaatctccttcaactccgataacgacgttgccagctctgttgtgggcacaccgaccagcgttgttggtgaagatatgatgaaagaccaggctattaacatgaccggtatcaccggtacgttaatggaagatggtaaaggtaactactacgttgacgacggtgccggcaacctgactgaagcgactattgataccactacctggactgcaacggataccggtaaagctgtttctactactccggcaacttccgatccgctgaccaaaatcgacgaagcactggcgcaggttgatgaaatgcgttccggtctgggtgcagtacagaaccgtttcgcgtctgttatcagcaacctgaacaacaccgttaacaacctgtctgaatctcgctctcgtattctggatgctgacttcgcgtctgaagtatctgaaatgagccgcgcgaacattctgcagtctgcaggcaccaccgtgctggcacaggctaaccaggttccgcagaacgtgctgtctctgctgggctaa

SEQ ID NO: 63 - DNA, 924 bp, Kosakonia cowanii
  source 1..924: mol_type = genomic DNA
atgcgtcttagcacaagttatatttttcaaaaccgcatagacagcctgggcgacgcgatgacgggttacaacgacctggcgacccgcctctctgctggccagacgctgctgaagccctctgacgatccgaccggcgcgtcgcagtctgttactttacaaacggcgctgtcgcgcatgagccagttcgacaccgcgcgcacctacgcgcaggatgcgctgggccaggaagataacaccctggactctatcggcaacttgctgacagagaacctgacgcagaaagtgattgccggtggtaacggtgcttactctgacgaagatcgcgccgcgctggcggaagagttacagggcatccgcgacaacctgctggatctggcgaacaccaaaaacagcgacggtcgctacatttttgccggctataaaactggcagcgcgccgttccaggccgatggcacctatgtcggcggcgataccgccatgacgcaggtggtctctgacagcaccgaaatgcaggtcggtcataccggctcagaggtgtttatgagcggcacgccggacgatctgtttgaagccctcgacaacgcgattgcgcagttgaaacagccggtcaccagcgatgccgacagggacgcgctgcaggctgtgctggatgattccaatgtcagcatcaagaagaatattgataacctcggcaaggtgcgcgccaccgtcggtaccaatatgcagcagattgaatcgttgggattcagcgctgaggctcaaagcatcaatgtgcagagccgcctgcaggaaaccttaggttcggactgggactcgatgattaccctgttatcccagtcaaagatgtcggaattcgcgcttaattcttccatgacggtatttcagtcgatgcagcagctctctattttcaaagtaatgggttga

SEQ ID NO: 64 - DNA, 677 bp, Kosakonia cowanii
  source 1..677: mol_type = genomic DNA
atggctgttattaatactaacaccctgtcgctgatgacccagaacaacctgactaaatcacagtcttctctgggtacttctattgagcgtctctcttccggtctgcgtatcaacagtgcaaaagatgatgctgctggtcaggcaattgccaaccgctttacttccaacatcaatggcctgggtgttgctgcccgtaacgccaacgacggtatctccctggcgcagaccgctgaaggcgcgctgagcgaagtgaacaacaacctgcagcgtatccgtgacctgaccgttcaggcgcagaacagctccaactccgcatctgacatcgactccatccaggctgaagttaaccagcgtatggaagagatcaaccgcgtaaccacccagaccgacttcaacggcatcaaagtgctgaacaccggtaccggttcaagcagctacagcttccaggttggcgcgaaagataacgaaactatctccatcagcctgaccaagtctgactcctacaacctgtacaacgccactggcgccactgcagcgactaccggccagaccatcaacggcaacaaacgttctactgccgctgaaggcttcgacgtactgaaaggtactgttgatgcgtccggtaaaaccgatggcggcccgctggcagatatcgataaggccatcaaagcggttga

SEQ ID NO: 65 - DNA, 637 bp, Kosakonia cowanii
  source 1..637: mol_type = genomic DNA
tatccgtgacctgaccgttcaggcacagaacagctccaactccgcgtccgatatcgactccatccaggctgaagttaaccagcgtatggaagagatcaaccgcgtgaccacccagaccgacttcaacggcattaaagtgcttaacaccggtaccggttcaagcagctataacttccaggttggttctaaagataacgaaactatctccatcagcctgagcaagtctgactcctacaacctgtataacgccactggtgcaactgcggtaaccaccacccagaccatcaacggtaacgcgcgttctacttctgctgaaggcttcgacgtactgaaaggtaccgttgactccactggcggtaccaacggtgctccgctggcagatatcgatgcggccatcaaagcagttgacgatcagcgcagcatgctgggtgcctcccagaaccgtttcgaatctaccatcactaacctgaacaacaccgtgagcaacctgtcagctgcccgcagccgtattcaggactccgactatgcgaccgaagtgtcgaacatgtcccgcgcgcagatcctgcagcaggccggttcttccgtgctggcgcaggccaaccaggttccgcagaccatgctgtccctgctgcgttaa

SEQ ID NO: 66 - DNA, 906 bp, Kosakonia cowanii
  source 1..906: mol_type = genomic DNA
atggctgttattaatactaacaccctgtcgctgatgactcagaacaacctgactaaatctcagtcttctctgggtacatctattgagcgcctgtcttccggcctgcgtattaacagtgctaaagatgatgccgcgggccaggcaattgccaaccgctttacttctaacatcaatggcctgaccgttgctgcccgtaacgccaacgacggtatctctctggcacagaccgctgaaggcgcgctgagcgaaattaacaacaacctgcagcgtatccgtgacctgaccgttcaggcgcagaacagctccaactccgcgtctgacatcgactccatccaggctgaagttaaccagcgtatggaagaagtgaaccgcgtgaccacccagaccgacttcaacggcatcaaagtgctgaacaccggtaccggttcaagcagctacagcttccaggttggcgcgaaagatagcgaaactatctccatcagcctgaccaagtctgactcctacaacctgtacaatgcgaccggtgcaaccgcagcgactaccggccagaccatcaacggcaacaaacgttctactgccgctgaaggcttcgacgtactgaaaggtactgttgatgcgtccggtaacaccgatggtagcccgctggcggatatcgataaggccatcaaagcggttgacgatcagcgcagcctgctgggtgcctcccagaaccgtttcgagtccaccatcactaacctgaacaacaccgtgagcaacctgtcagcggcccgcagccgtattcaggactccgactatgcgacggaagtgtcgaacatgtcccgcgcgcagatcctgcagcaggccggttcttccgtgctggcgcaggccaaccaggttccgcagaccatgctgtccctgctgcgttaa

SEQ ID NO: 67 - DNA, 909 bp, Kosakonia cowanii
  source 1..909: mol_type = genomic DNA
atggccgtcatcaataccaatacgctgtcactcatcaaccaaaataaccttaataaatcccaggcggcgcaaagctctgcaattcagcgtttatcctccggcctgcgtattaatagtgcgaaagatgatgctgcgggccaggcaattgccaaccgtttctcttccagcattagcggtatgggcgtggccgcaagaaatgccaacgatgctatttcgctggcacaaacggctgaaggtgcattaagcgaaatcaataacaacttgcagcgtatccgcgatctggccgtgcaggcgcaaaacagcactaactctgcctccgatgtcgactctattcagtcggaagtgaatgagcgtatggccgagattaaccgcgtgaccctgcagactgatttcaacggtatcaaaattctcaataccagctccggtacggccagttacggcttccatgtagggacagatgatggcgaagagattgttatcacgatgagcagcagcgatgactacaacctgggggcaaattccggttcgattggccaggtctctggcgaattcattcacggcaatgcacgcagcgtaaaagcagtcggctttgatgtgctccatggcaccgtcaccccctttagcggtgcgatactcaataatccccttgccgccattgacgatgcgataaaagccgtcgatacccaacgcagttcgctcggggcatttcagaaccgctttgaatcgacgatcaataaccttaatcaggcggcgacgaatctttccgccgcgcgcagccgaatcaatgacgccgactatggcacggaagtgtcgaatatgagcagggcgcagatattacaacaggccggctcgtctgtgctggcgcaggccaatcaggtgccgcagaccatgctgtcgttgctgcgttaa

SEQ ID NO: 68 - DNA, 1254 bp, Kosakonia cowanii
  source 1..1254: mol_type = genomic DNA
atgtcccaggttattaatactaacgcccttagcctcgtcgctcagaacaacctgaacaaatctcaggactctctgggcactgcaattgaacgtctctcttctggtctgcgtattaatagcgcgaaagacgatgcagcaggtcaggcgatctctaaccgtttcaccgccaacatcaacggtctgactcaggcttcccgtaacgccaacgatggtatctccattgcacagaccactgaaggcgcgctgaacgaaatcaacgacaacctgcagaacatccgtcgtctgtccgtacaggctcagaacggcaccaactcagattctgaccgtcagtccatccaggacgaaatcgatgcgcgtctggacgagatcaaccgtatctctgaacagaccgagttcaacggcgtgaaagtactgagcaaagaccagaagctctctatccaggttggttctaacgatggccagactatcgatatcgaactgaaccagatggactcttctactctgggtatggacggcttcagcgtagctaacggcattgacactactactctgactgcaagcaccggtacagtgaaagttgacagtggtttcgactacgatgcagctaaattcaccgacagtggcgcgaccgcagcaaccagcatcgacgatatcgtggttgatgataacggcgacgtgtttgcagtgaaaggcgctgaaatgtacgccgtaaccgaagatccgactactggtgaaatctccttcaactccgataacgacgttgccagctctgttgtgggcacaccgaccagcgttgttggtgaagatatgatgaaagaccaggctattaacatgaccggtatcaccggtacgttaatggaagatggtaaaggtaactactacgttgacgacggtgccggcaacctgactgaagcgactattgataccactacctggactgcaacggataccggtaaagctgtttctactactccggcaacttccgatccgctgaccaaaatcgacgaagcactggcgcaggttgatgaaatgcgttccggtctgggtgcggtacagaaccgtttcgcgtctgttatcagcaacctgaacaacaccgttaacaacctgtctgaatcccgctctcgtattctggatgctgacttcgcgtctgaagtatctgaaatgagccgcgcgaacattctgcagtctgcaggcaccaccgtgctggcacaggctaaccaggttccgcagaacgtgctgtctctgctgggctaa

SEQ ID NO: 69 - DNA, 408 bp, Kosakonia cowanii
  source 1..408: mol_type = genomic DNA
tatccgtgacctgaccgttcaggcacagaacagctccaactccgcgtccgatatcgactccatccaggctgaagttaaccagcgtatggaagagatcaaccgcgtgaccacccagaccgacttcaacggcattaaagtgctgaacaccggtaccggttcaagcagctacagcttccaggttggttctaaagatagcgaaactatctccatcagcctgaccaagtctgactcctacaacctgtacaatgcgaccggtgcaacagcgcagactaccggccagaccatcaacggcaacaaacgttctactgccgctgaaggcttcgacgtactgaaaggtactgttgatgcgtccggtaaaaccgatggcggcccgctggcagatatcgataaggccatcaaagcggttga

SEQ ID NO: 70 - DNA, 369 bp, Kosakonia cowanii
  source 1..369: mol_type = genomic DNA
atggctgttattaatactaacaccctgtcgctgatgacccagaacaacctgactaaatcacagtcttctctgggcacctcgattgagcgtctctcttccggtctgcgtatcaacagtgcaaaagatgatgctgctggtcaggcgatcgccaaccgtttcacctctaacatcaatggtcttaccgttgctgcccgtaacgccaacgacggtatctccctggcgcagactgctgaaggcgcgctgagcgaagtgaacaacaacctgcagcgtatccgtgacctgaccgttcaggcacagaacagctccaactccgcgtccgatatcgactccatccaggctgaagttaaccagcgtatggaagagatcaac

SEQ ID NO: 71 - DNA, 936 bp, Kosakonia cowanii
  source 1..936: mol_type = genomic DNA
atggccgttatcaacacaaatacgctgtcactggttacgcagaataacctgacaaagtcacagtcttcactaggcacggcgattgagcgcctgtcttccggtctgcgcatcaacagtgcaaaagatgatgcagccggtgaggccatcgctaaccgtttcacctccaacatcaacgggatgaccgttgccgcccgcaatgccaacgacggtatttcgctgtcgcagaccgccgagggcgcgctgactgaaattaacaataatctgcagcgagttcgtgacctgaccgttcaggcgcagaacagctctaactcagcctcggatgtcgactcgattcaggctgaagttaaccagcgcatgcaggaaatcgaccgcgttacgaaacagactgatttcaacggtatcaaagtgctgaacaccggctccggcagcaccacctacaatttccaggtgggcgcaaaagacggcgaaactattggtattgcgctgagctcaagcgacggttttgacctggctgcagcgggcaacgcttctacaggcaccactcagaataccagttctacgacaggccagacggtcaacggcaatgcccgcaccacgtcagccatcggcttcgacgtgctgaaaggggctgtcaccggcggttcaggcggcacagcgtcaggtaccacgccgctggccgacattgataaagccatcaaagcggtcgataaccagggcagcctgctgggtgcctcgcaaaaccgtttcgagtccaccatcagcaacctgaacaataccgtgacaaacctgaccgcggcccgcagccgtattcaggatgcggattacgcgacggaagtgtcgaacatgtctcgcgcgcagatcctgcagcaggctggctcttctgttctggcccaggccaaccaggtaccacagaccatgctgtctctgctgcgttaa

SEQ ID NO: 72 - DNA, 333 bp, Kosakonia cowanii
  source 1..333: mol_type = genomic DNA
atggctgttattaatactaacaccctgtcgctgacgacccagaacaacctgactaaatctcagtcttccctgggcactgcgatcgagcgtctctcttccggtctgcgtatcaacagtgcaaaagatgatgctgctgggcaggcgatcgctaaccgttttacctctaacatcaatggcctgggtgttgctgcccgtaacgccaacgacggtatctctctctcccagaccgctgaaggcgcgctgggcgaaatcaacaacaacctgcagcgtatccgtgacctgaccgttcaggcacagaacagctccaactccgcgtctgacatcgactccatc

SEQ ID NO: 73 - DNA, 470 bp, Kosakonia cowanii
  source 1..470: mol_type = genomic DNA
gtgaacaacaacctgcagcgtatccgtgacctgaccgttcaggcgcagaacagctccaactccgcatctgacatcgactccatccaggctgaagttaaccagcgtatggaagagatcaaccgcgtgaccacccagaccgacttcaacggcattaaagtgctgaacaccggtaccggttcaagcagctacagcttccaggtcggttctaaagatagcgaaactatctccatcagcctgaccaagtctgactcctacaacctgtacaatgcgaccggtgcaacggcgcagactaccggccagaccatcaacggcaacaaacgttctactgccgctgaaggcttcgacgtactgaaaggtactgttgatgcgtccggtagcaccgatggcagcccgctggcagatatcgataaggccatcaaagcggttgacgatcagcgcagcctgctgggtgcctcccagaaccgtttcga

SEQ ID NO: 74 - DNA, 719 bp, Kosakonia cowanii
  source 1..719: mol_type = genomic DNA
atggctgttattaatactaacaccctgtcgctgatgacccagaacaacctgactaaatctcagtcttctctgggtacatctattgagcgcctgtcttccggcctgcgtattaacagtgctaaagatgatgccgcgggccaggcaattgccaaccgctttacttctaacatcaatggcctgaccgttgctgcccgtaacgccaacgacggtatctctctggcacagaccgctgaaggcgcgctgagcgaaattaacaacaacctgcagcgtatccgtgacctgaccgttcaggcgcagaacagctccaactccgcgtctgatatcgactccatccaggctgaagttaaccagcgtatggaagaagtgaaccgcgtgaccacacagaccgacttcaacggcatcaaagtgctgaacaccggtaccggttcaagcagctacagcttccaggttggcgcgaaagatagcgaaactatctccatcagcctgaccaagtctgactcctacaacctgtacaatgcgaccggtgcaaccgcagcgactaccggccagaccatcaacggcaacaaacgttctactgccgctgaaggcttcgacgtactgaaaggtactgttgatgcgtccggtaacaccgatggtagcccgctggcggatatcgataaggccatcaaagcggttgacgatcagcgcagcctgctgggtgcctcccagaaccgtttcga

SEQ ID NO: 75 - DNA, 906 bp, Kosakonia cowanii
  source 1..906: mol_type = genomic DNA
atggctgttattaatactaacaccctgtcgctgatgacccagaacaacctgactaaatctcagtcttctctgggtacatctattgagcgcctgtcttccggcctgcgtattaacagtgctaaagatgatgccgcgggccaggcaattgccaaccgctttacttctaacatcaatggcctgaccgttgctgcccgtaacgccaacgacggtatctctctggcacagaccgctgaaggcgcgctgagcgaaattaacaacaacctgcagcgtatccgtgacctgaccgttcaggcgcagaacagctccaactccgcgtctgatatcgactccatccaggctgaagttaaccagcgtatggaagaagtgaaccgcgtgaccacacagaccgacttcaacggcatcaaagtgctgaacaccggtaccggttcaagcagctacagcttccaggttggcgcgaaagataacgaaactatctccatcagcctgaccaagtctgactcctacaacctgtacaacgccactggcgccactgcagcgactaccggccagaccatcaacggcaacaaacgtgccaccgctgctgaaggcttcgacgtactgaaaggtaccgttgatgcgtccggtaaaaccaacggtgctccgctggcagatatcgatgcggccatcaaagcggttgacgatcagcgcagcctgctgggtgcctcccagaaccgtttcgagtccaccatcactaacctgaacaacaccgtgagcaacctgtcagctgcccgcagccgtattcaggactccgactatgcgaccgaagtgtcgaacatgtcccgcgcgcagatcctgcagcaggctggttcttccgtgctggcacaggccaaccaggttccgcagactatgctgtccctgctgcgttaa

SEQ ID NO: 76 - DNA, 906 bp, Kosakonia cowanii
  source 1..906: mol_type = genomic DNA
atggctgttattaatactaacaccctgtcgctgatgacccagaacaacctgactaaatcacagtcttctctgggcacctcgattgagcgtctctcttccggtctgcgtatcaacagtgcaaaagatgatgctgctggtcaggcgatcgccaaccgtttcacctctaacatcaatggtcttaccgttgctgcccgtaacgccaatgacggtatctctctggcgcagactgctgaaggcgcgctgagcgaagtgaacaacaacctgcagcgtatccgtgacctgaccgttcaggcacagaacagctccaactccgcgtccgatatcgactccatccaggctgaagttaaccagcgtatggaagagatcaaccgcgtgaccacccagaccgacttcaacggcattaaagtgctgaacaccggtaccggttcaagcagctataacttccaggttggttctaaagataacgaaactatctccatcagcctgagcaagtctgactcctacaacctctataacgccactggtgcaactgcggtaaccaccacccagaccatcaacggtaacgcgcgttctacttctgctgaaggcttcgacgtactgaaaggtaccgttgactccactggcggtaccaacggtgctccgctggcagatatcgatgcggccatcaaagcagttgacgatcagcgcagcatgctgggtgcgtcccagaaccgtttcgagtccaccatcactaacctgaacaacaccgtgagcaacctgtcagcggcacgcagccgtattcaggactccgactatgcgacggaagtgtcgaacatgtcccgcgcgcagatcctgcagcaggctggttcttccgtgctggcgcaggccaaccaggttccgcagaccatgctgtccctgctgcgttaa

SEQ ID NO: 77 - DNA, 288 bp, Kosakonia cowanii
  source 1..288: mol_type = genomic DNA
atggctgttattaatactaacaccctgtcgctgatgactcagaacaacctgactaaatctcagtcttctctgggcacctctattgagcgcctgtcttctggcctgcgtatcaacagcgcgaaagatgatgctgcgggtcaggccattgccaaccgctttacgtccaacatcaacggcctgtccgttgcagcacgtaacgccaacgacggtatctctctctcccagaccgctgaaggcgcgctgggcgaaatcaacaacaacctgcagcgtatccgtgacctgaccgtt

SEQ ID NO: 78 - DNA, 288 bp, Kosakonia cowanii
  source 1..288: mol_type = genomic DNA
atggctgttatcaataccaataccctgtctctgatgactcagaacaacctgactaaatctcagtcttctctgggcacctctattgagcgtctctcttccggtctgcgtatcaacagtgcaaaagatgatgcagcgggtcaggcgatcgccaaccgctttacgtccaacatcaacggcctgtccgttgcagcacgtaacgccaacgacggtatctctctctcccagaccgctgaaggcgcgctgggcgaaatcaacaacaacctgcagcgtatccgtgacctgaccgtt

SEQ ID NO: 79 - DNA, 555 bp, Kosakonia cowanii
  source 1..555: mol_type = genomic DNA
atggaagaagtgaaccgcgtaactaaccagaccgacttcaacggcattaaagtgctgaacaccggttccggcaccagcacctataacttccaggttggttcgaaagacggcgagaagatcggtatcgacatcagctccagcgacagctacaacctggctgcagcgggctcttccggtactgcactgaacaccaaagccatggcttccggtgataccgttaacggtacccagcgccagactcaggctgttggcttcgacgttctgaaaggtaaagtcaccggcggcgcgagcggttctgcttctggtactactccgctggcagatatcgatgcggcaatcaagtctgttgactcccagcgcagcctgctgggtgcgtcccagaaccgtttcgaatccaccatcactaacctgaataacaccgtgagcaacctgtcgtctgcccgcagccgtattcaggactccgactatgcgaccgaagtgtcgaacatgtcccgcgcgcagatcctgcagcaggctggttcttccgtgctggcgcaggccaaccaggttccgcag

SEQ ID NO: 80 - DNA, 1245 bp, Kosakonia cowanii
  source 1..1245: mol_type = genomic DNA
atgtcccaggttattaatactaacgcccttagcctcgtcgctcagaacaacctgaacaaatctcaggactctctgggtactgcaattgaacgtctctcttctggtctgcgtattaatagcgcgaaagacgatgcagcaggtcaggcgatctctaaccgtttcaccgctaacatcaacggtctgactcaggcttcccgtaacgccaacgatggtatctccattgcacagaccactgaaggcgcgctgaacgaaatcaacgacaacctgcagaacatccgtcgtctgtccgtacaggctcagaacggcaccaactccgattctgaccgtcagtccatccaggacgaaatcgatgcgcgtctggacgagatcaaccgtatctctgaacagaccgagttcaacggcgtgaaagtactgagcaaagaccagaagctctctatccaggttggttctaacgatggtcagactatcgatatcgaactgaaccagatggatgcctctactctcggtatggacggcttcaccgttgcaagcggtgttgatgctactaaactgaccacaaccactgatattaatgtcaaagttgccgttgctgatgatctgagcaacgttaccgactctgcgggtggtactgttgctgcagaagaagtggtaaccggctctgacggtaaaacctatgttgttggtgacgatggtaactactacgaagcaaaagcaaatgctgctggtgacggtatcgaatttgacaccggtactgttgcaaccactactggtgtaaccatgagctccgataaatcaggctcttctgttagcgtaactcagacggctgatttgggttctctgactgaagatctggtaacggatggtgaaggtaacttctacctgcaagatgctaacggcagcgtatatgaagcaaccgctgacgcaaccggcgcggtgaccaaaggtgaaagactttctaccgctgcggccactgacgatccgctgaccaaaattgacgacgcgctggcgcaggttgatgaaatgcgttccggtctgggtgcggtacagaaccgtttcgcgtctgttatcagcaacctgaacaacaccgttaacaacctgtctgaatcccgctctcgtattctggatgctgacttcgcgtctgaagtatctgaaatgagccgcgcaaacattctgcagtctgcaggcaccaccgtgctggcacaggctaaccaggttccgcagaacgtgctgtctctgctgggctaa

SEQ ID NO: 81 - DNA, 326 bp, Kosakonia cowanii
  source 1..326: mol_type = genomic DNA
atgaatgcaagctccggctggaacttgtcagctgcttccgctccaggcacaggcaacgccaacgttgcttctggtgaccgtaaagtagaagttagtgggtttgatgtgctgacggcaagcggagctggggcggctggtacgaccggtgcgctgtcaactattgatgacgctattaaagcggttgatactcagcgcagcatgctgggtgcgtctcagaaccgtttcgaatcgaccatcactaacctgaacaacactgtaaacaacctgtctgccgcacgcagccgtattcaggattctgattacgcgactgaagtatccaacatgtc

SEQ ID NO: 82 - DNA, 266 bp, Kosakonia cowanii
  source 1..266: mol_type = genomic DNA
atggctgttattaatactaacaccctgtcgctgatgacccagaacaacctgaacaaatctcagtcttctctgggcacctcgatcgagcgtctctcttccggtctgcgtatcaacagtgctaaagatgatgctgctggccaggcgattgctaaccgcttcacctccaacatcaacggtctgagcgttgcagcacgtaacgccaacgacggtatctctctggcgcagaccgctgaaggcgcactgagcgaaatcaacaacaacctgca

SEQ ID NO: 83 - DNA, 543 bp, Kosakonia cowanii
  source 1..543: mol_type = genomic DNA
gcgtgtacgtgatctgaccgttcaggcgcagaacagctctaactctgcttccgacatcgactccatccaggctgaagttaaccagcgtctgtctgaaatcgaccgtgttaccaagcagaccgacttcaacggtaccaaaattctgaacaacactgctgcgaaaaccttcgatttccaggttggtgcaaaagatggtgaaactatcggtatcaccatgaatgcaagctccggctggaacctgtccggcgctgccgccgcgggtgcgggcaacagcaacgtagctgctgctgaccgtaaggtgcaagtaagcgggtttgatgtgctgaaagccactgttactggtgctggcgctcctaccactggtgcactgtccaccattgatgacgctatcaaagcggttgatactcagcgcagcatgctgggtgcgtctcagaaccgtttcgaatcgaccatcactaacctgaacaacactgtaaacaacctgtctgccgcgcgcagccgtattcaggactctgactacgcgacagaagtatcaaacatgtc

SEQ ID NO: 84 - DNA, 266 bp, Kosakonia cowanii
  source 1..266: mol_type = genomic DNA
atggctgttattaatactaacaccctgtcgctgatgacccagaacaatctgaacaagtctcagtcttctctgggtacctctattgagcgtctgtcttccggtctgcgtatcaacagtgctaaagatgatgctgctggccaggcgattgctaaccgcttcacttccaacatcaacggtctgagcgttgcagcacgtaacgccaacgacggtatctctctggcgcagactgctgaaggcgcgctgagtgaaatcaacaacaacctgca

SEQ ID NO: 85 - DNA, 924 bp, Kosakonia cowanii
  source 1..924: mol_type = genomic DNA
atgcgtcttagcacaagttatatttttcaaaaccgcatagacagcctgggcgacgcgatgacgggttacaacgacctggcgacccgcctctctgctggccagacgctgctgaagccctctgacgatccgaccggcgcgtcgcagtctgtcaccttacaaacggcgctgtcgcgcatgagccagttcgacaccgcgcgcacctacgcgcaggatgcattaggccaggaagataacaccctggactctatcggcaacttgctgacagagaacctgacgcagaaagtgatcgccggtggtaacggtgcttactcggatgaagatcgcgccgcgctggcggaagagttacagggcatccgcgataatctgctggatctggcgaacaccaaaaacagcgacgggcgctatatttttgccgggtataaaaccggtagcgcgccgttccaggccgatggcagctatgtcggcggcgataccgccatgacgcaggtggtctccgacagcaccgaaatgcaggtcggtcataccggttcagaggtgtttctcagcggcacgccggacgatctgtttcaggccctcgacagcgccattgcgcagctgaaacagccggtcaccagcgatgcggacagggatgcgctgcaagcagtgctggacgatgccaatgtcagcatcaagaaaaatattgataacctcggcaaggttcgcgccaccgtcggtaccaatatgcagcagattgaatcgctgggattcagcgctgaggcacaaagcatcaatgtgcagagccgtctgcaggaaacgttaggttcggactgggactcgatgattaccctgttatcccagtcaaagatgtctgaattcgcgcttaattcctccatgacggtatttcagtcgatgcagcagctctctatttttaaagtaatgggttga

SEQ ID NO: 86 - DNA, 725 bp, Kosakonia cowanii
  source 1..725: mol_type = genomic DNA
gtgttgctgcccgtaacgccaacgacggtatctccctggcgcagaccgctgaaggcgcgctgagcgaagtgaacaacaacctgcagcgtatccgtgacctgaccgttcaggcgcagaacagctccaactccgcatctgacatcgactccatccaggctgaagttaaccagcgtatggaagagatcaaccgcgtgaccacccagaccgacttcaacggcatcaaagtgctgaacaccggtaccggttcaagcagctacagcttccaggttggcgcgaaagataacgaaactatctctatcagcctgaccaagtctgactcctacaacctgtacaacgccactggcgcaactgcagcgacgaccggccagaccatcaacggcaacaaacgttctactgccgctgaaggcttcgacgtactgaaaggtaccgttgatgcatccggtaaaaccgatggcggcccgctggctgatatcgatgcggccatcaaagcggttgacgatcagcgcagcctgctgggtgcgtcccagaaccgtttcgaatccaccatcactaacctgaacaacaccgtgagcaacctgtcagcggcccgcagccgtattcaggactccgactacgcgacggaagtgtctaacatgtcccgcgcgcagatcctgcagcaggccggttcttccgtgctggcgcaggccaaccaggttccgcagaccatgctgtccctgctgcgttaa

SEQ ID NO: 87 - DNA, 841 bp, Kosakonia cowanii
  source 1..841: mol_type = genomic DNA
atggctgttattaatactaacaccctgtcgctgatgactcagaacaacctgactaaatctcagtcctctctgggtacatctattgagcgcctgtcttccggcctgcgtattaacagtgctaaagatgatgccgcgggtcaggcaattgccaaccgctttacttctaacatcaatggcctgaccgttgctgcccgtaacgccaacgacggtatctctctggcacagaccgctgaaggcgcgctgagcgaaattaacaacaacctgcagcgtatccgtgacctgaccgtgcaggcgcagaacagctccaactccgcgtctgatatcgactccatccaggctgaagttaaccagcgtatggaagaagtgaaccgcgtgaccactcagaccgacttcaacggcatcaaagtgctgaacaccggtaccggttcaagcagctacagcttccaggttggcgcgaaagatagcgaaactatctccatcagtctgaccaagtctgactcctacaacctgtacaacgccactggcgcgactgcggcgacgaccggtcagaccatcaacggcaacaaacgttctactgccgctgaaggcttcgacgtactgaaagggactgttgatgcgtccggtaacaccaacggtagcccgctggcagacatcgactccgctatcaaagcggttgacgatcagcgcagcctgctgggtgcgtcccagaaccgtttcgaatcgaccatcactaacctgaacaacaccgtgagcaacctgtcagctgcccgcagccgtattcaggactccgactacgcgacggaagtgtctaacatgtcccgcgcgcagatcctgcagcagg

SEQ ID NO: 88 - DNA, 402 bp, Kosakonia cowanii
  source 1..402: mol_type = genomic DNA
gtgaccacccagaccgacttcaacggcatcaaagtgctgaacaccggtacgggctcaagcagctacagcttccaggttggttctaaagataacgaaacgatctctatcagcctgaccaagtctgactcctacaacctgtacaatgcgaccggtgcaactgcagcgacgaccggccagaccatcaacggcaacaaacgttctactgccgctgaaggcttcgacgtactgaaaggtaccgttaacgcgtccggtaacaccgatggtagcccgctggcagatatcgatgcggccatcaaagcggttgacgatcagcgcagcatgctgggtgcgtcccagaaccgtttcgaatcgaccatcactaacctgaacaacaccgtgagcaacctgtccgcagcgcgcagc

SEQ ID NO: 89 - DNA, 558 bp, Kosakonia cowanii
  source 1..558: mol_type = genomic DNA
ctggcgcagaccgctgaaggcgcgctgagcgaagtgaacaacaacctgcagcgtatccgtgacctgaccgttcaggcacagaacagctccaactccgcatctgacatcgactccatccaggctgaagttaaccagcgtatggaagagatcaaccgcgtgaccacccagaccgacttcaacggcatcaaagtgctgaacaccggtaccggctcaagcagctacaacttccaggttggttctaaagatagcgaaacgatctccatcagcctgagcaagtctgactcctacaacctgtacaacgccactggtgccaccgcgtcgacgaccggccagaccatcaacggcaacaaacgtacgacttctgctgaaggcttcgacgtactgaaagggaccgttgactccactggcggtaccaacggtagcccgctggcagatatcgatgcggccatcaaagcggttgacgatcagcgcagcatgctgggtgcgtcccagaaccgtttcgaatcgaccatcactaacctgaacaacaccgtgagcaacctgtccgcagcgcgcagc

SEQ ID NO: 90 - DNA, 909 bp, Kosakonia cowanii
  source 1..909: mol_type = genomic DNA
atggccgtcatcaataccaatacgctgtcactcattaaccaaaataatcttggtaaatcccaggcggcgcagagttctgccattcagcgtttatcctcaggcctgcgtattaatagcgcgaaagatgacgctgcaggccaggcgattgccaaccgtttctcttccagtattaacggtatgggcgtggccgcaagaaatgccaacgatgccatttcgctggcacaaaccgcagaaggtgcattaagcgaaatcaataacaacttgcagcgtatccgcgatctggccgtgcaggcgcaaaacagcaccaactccgcctccgatgtcgactctattcagtcggaagtgaatgagcggatggccgagattaaccgcgtgaccctgcagactgattttaacggcatcaaaattctcaataccagctcgggtgcgtccagttacggcttccacgtgggtgcagatgatggcgaagagattgttatcaggataagcagcagcgacgactataacctcggggcaaattccggttcgattggtgaggtctccggcgaatttattcacggcaatgcacgcagcgtaagagccattggctttgatgtgctgcatggtaccgtcaccccctttagcggcgcgatactcaataatccacttgccgccattgacgatgcgataaaagccgtcgatacccaacgcagttcgctcggggcctttcagaaccgctttgagtcggtgataaataacctcaatcaggcggcgacgaatctctccgccgcgcgcagccgaataaatgacgccgactatggcacggaagtgtcgaatatgagcagggcgcagatactacaacaggccggctcttctgtgctggcccaggcaaaccaggtgccacagaccatgctgtcgttactgcgttaa

SEQ ID NO: 91 - DNA, 1251 bp, Kosakonia cowanii
  source 1..1251: mol_type = genomic DNA
atgtcccaggttattaatactaacgcccttagccttgttgctcagaacaacctgaacaaatctcaggactctctgggtactgcaatcgaacgtctctcttctggtctgcgtattaatagcgcgaaagacgatgcagcaggtcaggcgatctctaaccgtttcaccgcgaacatcaacggtctgactcaggcttcccgtaacgccaacgacggtatctccatcgcgcagactactgaaggcgcgctgaacgaaatcaacgacaacctgcagaacatccgtcgtctgtccgtacaggcacagaacggcaccaactctgattctgaccgtcagtccatccaggacgaaatcgacgcgcgtctggacgagatcaaccgtatctctgaacagaccgagttcaacggcgtgaaagtactgagcaaagatcagaagctctctatccaggttggttctaacgatggccagactatcgatatcgaactgaaccagatggactcttctactctgggtatggacggcttcaccgtcgctaacggcgttgatcctactactctgactgcaagcactggtaccgtgaaagttgacagtggtttcgattacgatgttgctaattttactgattccgcgggtactgctaccgcagttgacgatatcgtggtggacgataacggcgacgtctatgcgcaggttggcgctaaattgcacaaagtaacagaagatccgaccaccggtgagatctccttcaactccggtaccgacgacaccgcctccgtagtaggcaccccgacaagtgttgctggtcagagcatgatgaaagaccaggctgttgatatgaccggcatcaccggtacgctgatggaagatggccagggtaactactatgttgacgacggtgccggcaacctgaccgaagctaaaatcgataccactacctggaaagcagaggataccggtaaagctgtttccacgactccggcaactaccgatccgctgaccaaaatcgacgaagcgctggcgcaggttgatgaaatgcgttccggtctgggtgcggtacagaaccgtttcgcttctgttatcagcaacctgaacaacaccgttaacaacctgtctgaatctcgctctcgtattctggatgctgacttcgcgtctgaagtatctgaaatgagccgcgcgaacattctgcagtctgcaggcaccaccgtgctggcacaggctaaccaggttccgcagaacgtcctctctctgctgcgttaa

SEQ ID NO: 92 - DNA, 924 bp, Kosakonia cowanii
  source 1..924: mol_type = genomic DNA
atgcgtcttagcacgagttatatttttcaaaatcgcatagacagcctgggcgacgcgatgacgggttacaacgacctggcgacccgcctctctgccggccagacgctgctgaagccctctgacgatccgacgggcgcgtcgcagtctgtcaccttacagacggcgctttcgcgcatgagccagttcgacaccgcgcgcacctacgcgcaggatgcgttgggccaggaagacaacacgctcgactccatctctaacctgctgacagaaaacctgacgcaaaaagtgattgctggcgggaacggcgcttactcggacgaggatcgcgctgcgctggcggaagagttacagggtattcgcgataacttgctggatctggcgaacaccaaaaacagcgacggtcgttatatctttgccggatataaaaccggtaacgcgccgttccaggccgatggcacctatgtcggcggcgataccgccatgacccaggttgtctccgacagcaccgaaatgcaggtcggccataccggctcagatgtgtttatgagcggcacaccggacgatctgtttaaagccctcgacagcgcgattgcgcaactgaagcagccggtcaccagcgatgcggaccgggatgcgctacaggctgtgctggacgacgccaacgtcagcatcaagaaaaatattgataacctgggcaaagttcgtgccacggtcggtaccaatatgcagcagatcgaggcgcttggctttagcgccgaggcgcagagtatcaatgtacaaagcagattgcaggagacattaggctcggactgggactcgatgattaccttattgtcacaatcaaagatgtcagaattcgcgcttaactcatccatgacggtatttcagtcaatgcagcagctctctattttcaaagtgatgggctga

SEQ ID NO: 93 - DNA, 906 bp, Kosakonia cowanii
  source 1..906: mol_type = genomic DNA
atggctgttattaatactaacaccctgtcgctgatgacccagaacaacctgactaaatctcagtcttctctgggcacctcgattgagcgtctctcttccggtctgcgtatcaacagcgctaaagatgatgctgctggtcaggcgatcgcgaaccgtttcacctctaacatcaacggcctgaccgttgctgcccgtaacgctaacgacggtatctccctggcgcagaccgctgaaggcgcgctgagcgaagtgaacaacaacctgcagcgtatccgtgacctgaccgttcaggcgcagaacagctccaactccgcatctgacatcgactccatccaggctgaagttaaccagcgtatggaagagatcaaccgcgtgaccacccagaccgacttcaacggcatcaaagtgctgaacaccggtaccggctcaagcagctacaacttccaggttggttctaaagatagcgaaacgatctccatcagcctgagcaagtctgactcctacaacctgtacaacgccactggtgccaccgcgtcgacgaccggccagaccatcaacggcaacaaacgtacgacttctgctgaaggcttcgacgtactgaaagggaccgttgactccactggcggtaccaacggtagcccgctggcagatatcgatgcggccatcaaagcggttgacgatcagcgcagcatgctgggtgcgtcccagaaccgtttcgaatcgaccatcactaacctgaacaacaccgtgagcaacctgtccgcagcgcgcagccgtattcaggactccgactacgcgacggaagtgtcgaacatgtcccgcgcgcagatcctgcagcaggccggttcttccgtgctggcgcaggccaaccaggttccgcagaccatgctctccctgctgcgttaa

SEQ ID NO: 94 - DNA, 612 bp, Kosakonia cowanii
  source 1..612: mol_type = genomic DNA
cagaacagctccaactccgcatctgacatcgactccatccaggctgaagttaaccagcgtatggaagagatcaaccgcgtgaccacccagaccgacttcaacggcatcaaagtgctgaacaccggtaccggttcaagcagctacagcttccaggttggcgcgaaagataacgaaactatctctatcagcctgaccaagtctgactcctacaacctgtacaacgccactggcgcaactgcagcgacgaccggccagaccatcaacggcaacaaacgttctactgccgctgaaggcttcgacgtactgaaaggtaccgttgatgcatccggtaaaaccgatggcggcccgctggctgatatcgatgcggccatcaaagcggttgacgatcagcgcagcctgctgggtgcgtcccagaaccgtttcgaatccaccatcactaacctgaacaacaccgtgagcaacctgtcagcggcccgcagccgtattcaggactccgactacgcgacggaagtgtctaacatgtcccgcgcgcagatcctgcagcaggccggttcttccgtgctggcgcaggccaaccaggttccgcagaccatgctgtccctgctgcgttaa

SEQ ID NO: 95 - DNA, 906 bp, Kosakonia cowanii
  source 1..906: mol_type = genomic DNA
atggctgttattaatactaacaccctgtcgctgatgactcagaacaacctgactaaatctcagtcctctctgggtacatctattgagcgcctgtcttccggcctgcgtattaacagtgctaaagatgatgccgcgggtcaggcaattgccaaccgctttacttctaacatcaatggcctgaccgttgctgcccgtaacgccaacgacggtatctctctggcacagaccgctgaaggcgcgctgagcgaaattaacaacaacctgcagcgtatccgtgacctgaccgtgcaggcgcagaacagctccaactccgcgtctgatatcgactccatccaggctgaagttaaccagcgtatggaagaagtgaaccgcgtgaccactcagaccgacttcaacggcatcaaagtgctgaacaccggtaccggttcaagcagctacagcttccaggttggcgcgaaagatagcgaaactatctccatcagtctgaccaagtctgactcctacaacctgtacaacgccactggcgcgactgcggcgacgaccggtcagaccatcaacggcaacaaacgttctactgccgctgaaggcttcgacgtactgaaagggactgttgatgcgtccggtaacaccaacggtagcccgctggcagacatcgactccgctatcaaagcggttgacgatcagcgcagcctgctgggtgcgtcccagaaccgtttcgaatcgaccatcactaacctgaacaacaccgtgagcaacctgtcagctgcccgcagccgtattcaggactccgactacgcgacggaagtgtcgaacatgtcccgcgcgcagatcctgcagcaggccggttcttccgtgctggcgcaggccaaccaggttccgcagaccatgctctccctgctgcgttaa

SEQ ID NO: 96 - DNA, 906 bp, Kosakonia cowanii
  source 1..906: mol_type = genomic DNA
atggctgttattaatactaacaccctgtcgctgatgacccagaacaacctgactaaatcacagtcttctctgggtacttctattgagcgtctctcttccggtctgcgtatcaacagtgcaaaagatgatgctgctggtcaggcgattgccaaccgctttacttccaacatcaatggcctgggtgttgctgcccgtaacgccaacgacggtatctccctggcgcagaccgctgaaggcgcgctgagcgaagtgaacaacaacctgcagcgtatccgtgacctgaccgttcaggcacagaacagctccaactccgcatctgacatcgactccatccaggctgaagttaaccagcgtatggaagagatcaaccgcgtgaccacccagaccgacttcaacggcatcaaagtgctgaacaccggtacgggctcaagcagctacagcttccaggttggttctaaagataacgaaacgatctctatcagcctgaccaagtctgactcctacaacctgtacaatgcgaccggtgcaactgcagcgacgaccggccagaccatcaacggcaacaaacgttctactgccgctgaaggcttcgacgtactgaaaggtaccgttaacgcgtccggtaacaccgatggtagcccgctggcagatatcgatgcggccatcaaagcggttgacgatcagcgcagcctgctgggtgcgtcccagaaccgtttcgaatccaccatcactaacctgaataacaccgtgagcaacctgtcagctgcccgcagccgtattcaggactccgactacgcgacggaagtgtctaacatgtcccgcgcgcagatcctgcagcaggccggttcttccgtgctggcgcaggccaaccaggttccgcagaccatgctctccctgctgcgttaa

SEQ ID NO: 97 - DNA, 909 bp, Kosakonia cowanii
  source 1..909: mol_type = genomic DNA
atggccgtcatcaataccaatacgctgtcactcatcaaccaaaataaccttaataaatcccaggcggcgcaaagctctgcaattcagcgtttatcctccggcctgcgtatcaacagcgcgaaagatgacgctgcgggccaggcgattgccaaccgtttctcctccagcattaacggcatgggcgtggccgcaagaaatgccaacgatgctatttcgctggcacaaacggctgaaggcgcattaagcgaaataaataacaacttgcagcgtatccgcgatctggccgtgcaggcgcaaaacagcactaactctgcctccgatgtcgactctattcagtcggaagtgaacgagcgtatggccgagattaatcgcgtcacccgccagacagactttaacggcatcaaaattctcgatagcggctctggttcgtttggttacggcttccaggtgggtgctgatgatggcgaagagattgttctcactataggtggcagcgatgactataacctgggggcaaattccggttcgattggcgaagtctctggcgaatttattcacggtagcgcgcgtagcgtaaaagcaatgggctttgatgtgctccatggcaccgtcaccccctatagcggtgcaatactcaataatccccttgccgccattgacgatgcgataaaagctgtcgatacccaacgtagttcgctaggggcatttcagaaccgctttgaatcgacgatcaataacctcaatcaggcggcgaacagtctctccgctgcgcgcagccgaataaatgacgccgactatggcacggaggtctcaaatatgagcagggcgcaaatattacaacaggccggctcgtccgtgctggcgcaggccaaccaggtgccgcagaccatgctgtcgctgctgcgttaa

SEQ ID NO: 98 - DNA, 906 bp, Kosakonia cowanii
  source 1..906: mol_type = genomic DNA
atggctgttattaatactaacaccctgtcgctgatgacccagaacaacctgactaaatctcagtcttctctgggcaccgctattgagcgcctgtcttccggtctgcgtatcaacagtgcgaaagatgatgccgcgggccaggctatcgccaaccgctttacttccaatatcaatggcctgtccgtcgcagcgcgtaacgccaacgacggtatctcgctggcacagaccgctgaaggcgcgctgggcgaaatcaacaacaacctgcagcgtatccgtgacctgaccgttcaggcacagaacagctccaactccgcgtccgatgtcgactccatccaggctgaagttaaccagcgtatggaagagatcaaccgcgtgaccacccagaccgacttcaacggcatcaaagtgctgaacaccggtaccggcaccagcagctacagcttccaggttggcgcgaaagataacgaaactatctctatcagcctgagctcctctaacgcctacaacctgtacaacgccaccggcgccactgcacagactaccggccagaccatcaacggtaatgcccgtgctactgcagctgaaggcttcgatgtgcttcagggtaccgtaagcagcggcggcgttaccaacggctctccgctggcagatatcgatgcggcgatcaaatcagttgactcccagcgcagcctgctgggtgcgtcccagaaccgttttgaatcaaccatcaccaacctgaacaacaccgtgagcaacctgtcgtctgcccgcagccgtattcaggactccgactacgcgaccgaagtgtcgaacatgtcccgcgcgcagatcctgcagcaggccggttcttccgtgctggcccaggccaaccaggttccgcagaccatgctctccctgctgcgttaa

SEQ ID NO: 99 - DNA, 374 bp, Kosakonia cowanii
  source 1..374: mol_type = genomic DNA
atggctgttattaatactaacaccctgtcgctgatgactcagaacaacctgactaaatctcagtcttctctgggtaccgctattgagcgcctgtcttccggtctgcgtatcaacagtgcgaaagatgatgctgctggtcaggctatcgctaaccgttttacctctaacatcaatggcctgggtgttgctgcccgtaacgccaacgacggtatctctctctcccagaccgctgaaggtgcgctgggcgaaatcaacaacaacctgcagcgtatccgtgacctgaccgttcaggcacagaacagctccaactccgcgtctgacatcgactccatccaggctgaagttaaccagcgtatggaagaagtgaaccgcgt

SEQ ID NO: 100 - DNA, 909 bp, Kosakonia cowanii
  source 1..909: mol_type = genomic DNA
atggctgttattaatactaacaccctgtcgctgacgacccagaacaacctgactaaatctcagtcttccctgggcactgcgatcgagcgtctctcttccggtctgcgtatcaacagtgcaaaagatgatgctgctggtcaggcgatcgctaaccgttttacctctaacatcaatggcctgggtgttgctgcccgtaacgccaacgacggtatctctctctcccagaccgctgaaggcgcgctgggcgaaatcaacaacaacctgcagcgtatccgtgacctgaccgttcaggcacagaacagctccaactccgcgtctgacatcgactccatccaggctgaagttaaccagcgtatggaagaagtgaaccgcgtaaccaaccagaccgacttcaacggcatcaaagtgctgaacaccggttccggcaccagcacctataacttccaggtcggcgcgaaagacggcgagaagatcggtatcgacatcagctccagcgacagctacaacctggctgcagcgggttcttccggtactgcactgaacaccaaagccatggcttccggtgacaccgttaacggtacccagcgccagactcaggctgttggcttcgacgttctgaaaggtaaagtgaccggcggcgcgagcggtactgcttccggctccactccgctggcagatatcgatgcggcaatcaagtctgttgactctcagcgcagcctgctgggtgcgtcgcagaaccgtttcgaatccaccatcactaacctgaacaacaccgtgagcaacctgtcgtctgcccgcagccgtattcaggactccgactatgcgaccgaagtgtcgaacatgtcccgcgcgcagatcctgcagcaggctggttcttccgtgctggcgcaggccaaccaggttccgcag

SEQ ID NO: 101 - DNA, 924 bp, Kosakonia cowanii
  source 1..924: mol_type = genomic DNA
atgcgtcttagcacaagttatatttttcaaaaccgcatagacagcctgggcgacgcgatgacgggttacaacgacctggcgacccgcctctctgctggccagacgctgctgaagccctctgacgatccgaccggcgcgtcgcagtctgtcactttacaaacggcgctgtcgcgcatgagccagttcgacaccgcgcgcacctacgcgcaggatgcgctgggccaggaagataacaccctggactctatcggcaacttgctgacagagaacctgacgcagaaagtgattgccggtggtaacggtgcttactctgacgaagatcgcgccgcgctggcggaagagttacagggcatccgcgataacctgctggatctggcgaacaccaaaaacagcgacggtcgctacatttttgccggctataaaaccggcagcgcgccgttccaggccgatggcacctatgtcggcggcgataccgccatgacgcaggtggtctctgacagcaccgaaatgcaggtcggtcataccggctcagaggtgtttatgagcggcacgccggacgatctgtttgaagccctcgacaacgcgattgcgcagttgaaacagccggtcaccagcgatgctgacagggacgcgctgcaggctgtgctggatgactccaatgtcagcatcaagaagaatattgataacctcggcaaggtgcgcgccaccgtcggtaccaatatgcagcagattgaatcgctgggattcagcgctgaggctcaaagcatcaatgtgcagagccgcctgcaggaaaccttaggttcggactgggactcgatgattaccctgttatcccagtcaaagatgtcggaattcgcgcttaattcttccatgacggtatttcagtcgatgcagcagctctctattttcaaagtaatgggttga

SEQ ID NO: 102 - DNA, 794 bp, Kosakonia cowanii
  source 1..794: mol_type = genomic DNA
atggctgttatcaataccaataccctgtctctgatgactcagaacaacctgactaaatctcagtcttctctgggcacctctattgagcgtctctcttccggtctgcgtatcaacagtgcaaaagatgatgcagcgggtcaggcgatcgccaaccgctttacgtccaacatcaacggcctgtccgttgcagcacgtaacgccaacgacggtatctctctctcccagaccgctgaaggcgcgctgggcgaaatcaacaacaacctgcagcgtatccgtgacctgaccgttcaggcacagaatagctccaactccgcgtctgacatcgactccatccaggctgaagttaaccagcgtatggaagaagtgaaccgcgtaaccaaccagaccgacttcaacggcattaaagtgctgaacaccggttccggcaccagcacctataacttccaggttggttcgaaagacggcgagaagatcggtatcgacatcagctccagcgacagctacaacctggctgcagcgggctcttccggtactgcactgaacaccaaagccatggcttccggtgataccgttaacggtacccagcgtcagactcaggctgttggcttcgacgttctgaacggtaaagtaaccggcggcgcgagcggttctgcttctggtactactccgctggcagatatcgatgcggcaatcaagtctgttgactctcagcgcagcctgctgggtgcgtcccagaaccgtttcgaatccaccatcactaacctgaataacaccgtgagcaacctgtcgtctgc

SEQ ID NO: 103 - DNA, 1266 bp, Kosakonia cowanii
  source 1..1266: mol_type = genomic DNA
atgtcccaggttattaatactaacgcccttagcctcgtcgctcagaacaacctgaacaaatctcaggactctctgggtactgcaattgaacgtctctcttctggtctgcgtattaatagcgcgaaagacgatgcagcaggtcaggcgatctctaaccgtttcaccgccaacatcaacggtctgactcaggcttcccgtaacgccaacgatggtatctccatcgcgcagaccactgaaggcgcgctgaacgaaatcaacgacaacctgcagaacatccgtcgtctgtccgtacaggcacagaacggcaccaactccgattctgaccgtcagtccatccaggacgaaatcgacgcgcgtctggacgagatcaaccgtatctctgaacagaccgagttcaacggcgtgaaagtactgagcaaagaccagaagctctctatccaggtaggttctaacgatggccagactatcgatatcgaactgaaccagatggactcttctactctgggtatgagcgatttcaccgtagctaacggcattgataaaaccaccctgactgcaagcagcggtacagtaaaagttgacagtggtttcgattacgatacctctaactttaccgatacctcttccggtaccgcagtaaccagcatcgacgatatcgttgttgatgatagcggcgctgtctttgcgaagaaaggctcagaactgtatgccgtaaccgaagatccgacgactggtgagatctccttcgactccagcgttgacgcttctggctctgtcacaggttcaaccaccagcgttaatggtgagaacatgatgaaagaccaggcggttgatatgactgccatcaccgctgcgggcggtaccttgttggaagatggtgaaggtaactactacgttgacgacggtgccggcaacctgactgaagcgactattgatactactacctggactgcaacagataccggtaaagctgtttctaccactcaggccaccaccgatccgctgaccaaaatcgacgaagcgctggcgcaggttgatgaaatgcgttccggtctgggtgcggtacagaaccgtttcgcgtctgttatcagcaacctgaacaacaccgttaacaacctgtctgaatcccgctctcgtattctggatgctgacttcgcgtctgaagtatctgaaatgagccgcgcgaacattctgcagtctgcaggcaccaccgtgctggcacaggctaaccaggttccgcagaacgtgctgtctctgctgggctaa

SEQ ID NO: 104 - DNA, 906 bp, Kosakonia cowanii
  source 1..906: mol_type = genomic DNA
atggctgttatcaatactaacaccctgtcgctcacgacccagaacaacctgactaaatcacagtcttctctgggcaccgctattgagcgtctctcttccggtctgcgtatcaacagtgcaaaagatgatgctgctggtcaggcgatcgcaaaccgtttcacctctaacatcaatggcctgggtgttgcagcacgtaacgccaacgacggtatctccctggcacagaccgctgaaggcgcgctgggcgaaatcaacaacaacttacagcgtatccgtgacctgaccgttcaggcacagaacagctctaactctgcgtccgacatcgactccatccaggctgaagttaaccagcgtatggaagaagtgaaccgcgtgaccacccagaccgacttcaacggcatcaaagtgctgaacaccggtaccggcagcagcagctacgacttccaggtgggttctaaagacaacgaaaagatctccatcagcctgagctcttccaactcttacaacctgtacaacgccaccggcgccactgcacagactaccggccagaccatcaacggtaatgcccgtgctactgcagctgaaggcttcgatgtgcttcagggtaccgtaagcagcggcggcaccaccgacggctctccgctggcggatatcgatgcggcgatcaaatcggttgactcccagcgcagcctgctgggtgcgtcccagaaccgttttgaatcgaccatcaccaacctgaacaacaccgtgagcaacctgtcatctgcccgcagccgtattcaggactccgactacgcgaccgaagtgtcgaacatgtcccgcgcgcagatcctgcagcaggccggttcttccgtactggcccaggccaaccaggttccgcagaccatgctgtccctgctgcgttaa

SEQ ID NO: 105 - DNA, 262 bp, Kosakonia cowanii
  source 1..262: mol_type = genomic DNA
ggcagatatcgatgcggcgatcaaatcggttgactcccagcgcagcctgctgggtgcgtcccagaaccgttttgaatccaccatcaccaacctgaacaacaccgtgagcaacctgtcgtctgcccgcagccgtattcaggactccgactatgcgaccgaagtgtcgaacatgtcccgcgcgcagatcctgcagcaggccggttcttccgtgctggcccaggccaaccaggttccgcagaccatgctgtccctgctgcgttaa

SEQ ID NO: 106 - DNA, 785 bp, Kosakonia cowanii
  source 1..785: mol_type = genomic DNA
atggctgttattaatactaacaccctgtcgctgatgacccagaacaacctgactaaatctcagtcttctctgggcaccgctattgagcgcctgtcttccggcctgcgtattaacagtgcgaaagatgatgccgcgggccaggctatcgccaaccgctttacttccaacatcaatggcctgtccgtcgcagcgcgtaacgccaacgacggtatctcgctggcacagaccgctgaaggcgcgctgggcgaaatcaacaacaacctgcagcgcatccgtgacctgaccgttcaggcacagaacagctccaactccgcgtccgacgtcgactccatccaggctgaagttaaccagcgtatggaagagatcaaccgcgtgaccacccagaccgacttcaacggtatcaaagtgctgaacaccggtaccggcaccagcagctacagcttccaggttggcgcgaaagataacgaaactatctctatcagcctgagctcctctaacgcctacaacctgtacaacgccaccggcgccactgcacagactaccggccagaccatcaacggcaacgcccgtaccaccgcagctgaaggcttcgatgtgcttaagggtaccgtaagcagcggcggcgctaccgacggctctccgctggcagatatcgatgcggcgatcaaatcggttgactcccagcgcagcctgctgggtgcgtcccagaaccgttttgaatccaccatcaccaacctgaacaacaccgtgagcaacctgtcgtctgcccgcagccgtattcagga

SEQ ID NO: 107 - DNA, 1260 bp, Kosakonia cowanii
  source 1..1260: mol_type = genomic DNA
atgtcccaggttattaatactaacgcccttagcctcgtcgctcagaacaacctgaataaatctcagggctctctgggtactgcaattcagcgtctctcttctggtctgcgtattaacagcgcgaaagacgatgcagcaggtcaggcgatctctaaccgtttcaccgccaacatcaacggcctgagccaggcttcccgtaacgccaacgatggtatctccattgcacagaccactgaaggcgcgctgaacgaaatcaacgacaacctgcagaacatccgtcgtctgtccgtacaggcgcagaacggcaccaactccgattctgaccgtcagtccatccaggacgaaatcgacgcgcgtctggacgagatcaaccgtatctctgaacagactgagttcaacggcgtgaaagtactgagcaaagatcagagcctctctattcaggtaggttctaacgatggtcagactatcgatatcgaactgagcaaaatggattccagcaccctgagcatggatggtttcaccgtagctaacggcatcgacccaaataccctgactgccagcaccggtacagtgaaagttgacagtggtttcgactacgatgcgactaaattcaccgacggtgccaccaccggtaccccattgaccagcatcgacgatatcgtagttgacgataacggcgacgtgtttgcagtgaaaggcgctgaaatgtacgccgtaaccgaagatccgactactggtgaaatctccttcaactccgataacgacgttgccacctctgttgtaggcaccccgaccagcgttgttggtgaagatatgatgaaagaccaggctattaacatgaccggtatcaccggtacgttaatggaagatggtaaaggtaactactacgttgacgacggtgccggcaacctgactgaagcaactattgataccactacctgggctgcaacggataccggtaaagctgtttctactactccggcaacttccgatccgctgaccaaaatcgacgaagcgctggcgcaggttgatgaaatgcgttccggtctgggtgcggtacagaaccgtttcgcgtctgttatcagcaacctgaacaacaccgttaacaacctgtctgaatcccgctctcgtattctggatgctgacttcgcgtctgaagtatctgaaatgagccgcgcgaacattctgcagtctgcaggcaccaccgtgctggcacaggctaaccaggttccgcagaacgttctgtctctgctgcgttaa

SEQ ID NO: 108 - DNA, 909 bp, Kosakonia cowanii
  source 1..909: mol_type = genomic DNA
atggccgtcatcaataccaatacgctgtcactcatcaaccaaaataaccttaataaatcccaggcggcgcaaagctctgcaattcagcgtttatcctccggcctgcgtattaacagcgcgaaagatgacgctgcgggccaggcgattgccaaccgtttctcctccagcattaacggcatgggcgtggccgcaagaaatgccaacgatgctatttcgctggcacaaacggctgaaggcgcattaagcgaaataaataacaacttgcagcgtatccgcgatctggccgtgcaggcgcaaaatagcactaactctgcctccgacgtcgactctattcagtcggaagtgaatgaacgtatggccgagattaaccgcgtgacccgccagacagactttaacggcatcaaaattctcgatagcggctctggttcgtttggttacggcttccaggtgggtgctgatgatggcgaagagattgttctcacgataggtggcagcgatgactataacctgggggcaaattccggttcgattggcgaagtctctggcgaatttatccacggtaacgcgcgtagcgtaaaagcaatgggctttgatgtgctccatggcaccgtcaccccctacagcggtgcgatactcaataatccgcttgccgccattgacgatgcgataaaagccgtcgatacccaacgcagttcgctcggggcatttcagaaccgctttgaatcgaccataaacaacctcaaccaggcggcgaccagtctctccgctgcgcgcagccgaataaatgacgccgactatggtacggaggtctcaaatatgagcagggcgcaaatattacaacaggcgggctcgtccgtgctggcgcaggccaaccaggtgccgcagaccatgttgtcgctgctgcgttaa

SEQ ID NO: 109 - DNA, 468 bp, Kosakonia cowanii
  source 1..468: mol_type = genomic DNA
tccaactccgcgtccgacatcgactccatccaggctgaagttaaccagcgtatggaagaagtgaaccgcgtgaccacccagaccgacttcaacggcatcaaagtgctgaacaccggtaccggcagcagcagctacagcttccaggttggcgcgaaagataacgaaactatctccatcagcctgagctcttccaactcttacaacctgtacaacgccaccggcgccactgcacagactaccggccagaccatcaacggcaacgcccgtgctactgcagctgaaggcttcgatgtgcttcagggtaccgtaagcagcggcggcgctaccaacggctctccgctggcagatatcgatgcggcgatcaaatcggttgactcccagcgcagcctgctgggtgcgtcccagaaccgttttgaatccaccatcaccaacctgaacaacaccgtgagcaacctgtcgtctgcccgc

SEQ ID NO: 110 - DNA, 431 bp, Kosakonia cowanii
  source 1..431: mol_type = genomic DNA
atggctgttattaatactaacaccctgtcgctgacgacccagaacaacctgactaaatcacagtcttctctgggcaccgctattgagcgtctctcttccggtctgcgtattaacagtgcaaaagatgatgctgctggtcaggcaattgctaaccgtttcacctccaacatcaatggcctgggtgttgcagcgcgtaacgccaacgacggtatctccctggcacagaccgctgaaggcgcgctgggcgaaatcaacaacaacttacagcgtatccgtgacctgaccgttcaggcacagaacagctccaactccgcgtccgacatcgactccatccaggctgaagttaaccagcgtatggaagaagtgaaccgcgtgaccacccagaccgacttcaacggcatcaaagtgctgaacaccggtaccggcagcag

SEQ ID NO: 111 - DNA, 262 bp, Kosakonia cowanii
  source 1..262: mol_type = genomic DNA
ggcagatatcgatgcggcgatcaaatcggttgactcccagcgcagcctgctgggtgcgtcccagaaccgttttgaatccaccatcaccaacctgaacaacaccgtgagcaacctgtcgtctgcccgcagccgtattcaggattccgactacgcgaccgaagtgtcgaacatgtcccgcgcgcagatcctgcagcaggctggttcttccgtgctggcccaggccaaccaggttccgcagaccatgctctccctgctgcgttaa

SEQ ID NO: 112 - DNA, 924 bp, Kosakonia cowanii
  source 1..924: mol_type = genomic DNA
atgcgtcttagcacaagttatatttttcaaaaccgcatagacagcctgggcgacgcgatgacgggttacaacgacctggcgacccgcctctctgctggccagacgctgctgaagccctctgacgatccgaccggcgcgtcgcagtctgtcaccttacaaacggcgctgtcgcgcatgagccagttcgacaccgcgcgcacctacgcgcaggatgcattaggccaggaagataacactctggactctatcggcaacttgctgacagagaacctgacgcagaaagtgattgccggtggtaacggtgcctactctgacgaagatcgcgctgcgctggcggaagagttacagggcatccgcgataacctgctggatctggcgaacacaaaaaacagcgacggtcgttatatttttgccggatataaaaccggcagtgcgccgttccaggctgatggcacctatgtcggcggcgataccgctatgacccaggtggtctctgacagtactgaaatgcaggttggccataccggtgatgatgtctttctgagcggtacgccggacgatctgtttaaagccctcgacaacgcaattgcgcagctgaaacagccgatcaccagcgatgcggacagggatgcgctacaggctgtactggatgattccaatgtcagcattaagaaaaatatcgataacctcggcaaggttcgcgccaccgtcggtaccaatatgcagcagattgaatcactgggattcagcgctgaggcacaaagcatcaatgtgcagagccgcctgcaggaaaccttaggttcggactgggactcgatgattaccctgttatctcagtcaaagatgtcggaattcgcccttaattcctccatgacggtatttcagtcgatgcagcagctctctattttcaaagtaatgggttga

SEQ ID NO: 113 - DNA, 858 bp, Kosakonia cowanii
  source 1..858: mol_type = genomic DNA
atggctgttattaatactaacaccctgtcgctgatgactcagaacaacctgactaaatctcagtcttctctgggtacatctattgagcgcctgtcttccggcctgcgtattaacagtgctaaagatgatgccgcgggccaggcaattgccaaccgctttacttctaacatcaatggcctgaccgttgctgcccgtaacgccaacgacggtatctctctggcacagaccgctgaaggcgcgctgagcgaaattaacaacaacctgcagcgtatccgtgacctgaccgttcaggcgcagaacagctccaactccgcgtctgatatcgactccatccaggctgaagttaaccagcgtatggaagaagtgaaccgcgtgaccacccagaccgacttcaacggcatcaaagtgctgaacaccggtaccggttcaagcagctacagcttccaggttggcgcgaaagatagcgaaactatctccatcagcctgaccaagtctgactcctacaacctgtacaatgcgaccggcgcaaccgcagcgactaccggccagaccatcaacggcaacaaacgttctactgccgctgaaggcttcgacgtactgaaaggtactgttgatgcgtccggtaacaccgatggtagcccgctggcggatatcgataaggccatcaaagcggttgacgatcagcgcagcctgctgggtgcctcccagaaccgttttgagtccaccatcactaacctgaacaacaccgtgagcaacctgtcagctgcccgcagccgtattcaggactccgactatgcgaccgaagtgtcgaacatgtcccgcgcgcagatcctgcagcaggccggttcttccgtgctg

SEQ ID NO: 114 - DNA, 906 bp, Kosakonia cowanii
  source 1..906: mol_type = genomic DNA
atggctgttattaatactaacaccctgtcgctgatgacccagaacaacctgactaaatcacagtcttctctgggtacttctattgagcgtctctcttccggtctgcgtatcaacagtgcaaaagatgatgctgctggtcaggcaatcgccaaccgctttacttccaacatcaatggcctgggtgttgctgcccgtaacgccaacgacggtatctctctggcgcagaccgctgaaggcgcgctgagcgaagtgaacaacaacctgcagcgtatccgtgacctgaccgttcaggcgcagaacagctccaactccgcatctgacatcgactccatccaggctgaagttaaccagcgtatggaagagatcaaccgcgtaaccacccagaccgacttcaacggcatcaaagtgctgaacaccggtaccggttcaagcagctacagcttccaggttggcgcgaaagataacgaaactatctccatcagcctgaccaagtctgactcctacaacctgtacaacgccactggcgccactgcagcgactaccggccagaccatcaacggcaacaaacgtgccaccgctgctgaaggcttcgacgtactgaaaggtaccgttgatgcgtccggtaaaaccaacggtgctccgctggcagatatcgatgcggccatcaaagcggttgacgatcagcgcagcctgctgggtgcctcccagaaccgtttcgaatccaccatcactaacctgaacaacaccgtgagcaacctgtcagctgcccgcagccgtattcaggactccgactacgcgaccgaagtgtcgaacatgtcccgcgcgcagatcctgcagcaggccggttcttccgtgctggcacaggccaaccaggttccgcagaccatgctgtccctgctgcgttaa

SEQ ID NO: 115 - DNA, 440 bp, Kosakonia cowanii
  source 1..440: mol_type = genomic DNA
atggctgttattaatactaacaccctgtcgctgatgacccagaacaacctgactaaatcacagtcttctctgggcacctcgattgagcgtctctcttccggtctgcgtatcaacagcgcgaaagacgatgctgctggtcaggcgatcgcgaaccgctttacttctaacatcaacggcctgaccgttgctgctcgtaacgctaacgacggtatctctctggcacagaccgctgaaggcgcgctgagcgaagtgaacaacaacctgcagcgtatccgtgacctgaccgttcaggcgcagaacagctccagctccgcgtccgatatcgactccatccaggctgaagttaaccagcgtatggaagagatcaaccgcgtaaccacccagaccgacttcaacggcatcaaagtgctgaacaccggtaccggttcaagcagctacag

SEQ ID NO: 116 - DNA, 552 bp, Kosakonia cowanii
  source 1..552: mol_type = genomic DNA
atggaagagatcaaccgcgtgaccacccagaccgacttcaacggcattaaagtgctgaacaccggtaccggttcaagcagctacagcttccaggttggttctaaagatagcgaaactatctccatcagcctgaccaagtctgactcctacaacctgtacaatgcgactggtgcaacagcgcagactaccggccagaccatcaacggcaacaaacgttctactgccgctgaaggcttcgacgtactgaaaggtactgttgatgcgtccggtagcaccgatggcagcccgctggcagatatcgataaggccatcaaagcggttgacgatcagcgcagcctgctgggtgcctcccagaaccgtttcgagtccaccatcactaacctgaacaacaccgtgagcaacctgtcagcggcccgcagccgtattcaggactccgactatgcgacggaagtgtcgaacatgtcccgcgcgcagatcctgcagcaggccggttcttccgtgctggcacaggccaaccaggttccgcagaccatgctgtccctgctgcgttaa

SEQ ID NO: 117 - DNA, 437 bp, Kosakonia cowanii
  source 1..437: mol_type = genomic DNA
atggctgttattaatactaacaccctgtcgctgatgacccagaacaacctgactaaatcacagtcttctctgggcacctcgattgagcgtctctcttccggtctgcgtatcaacagtgcaaaagatgatgctgctggtcaggcgatcgccaaccgtttcacctctaacatcaatggtcttaccgttgctgcccgtaacgccaatgacggtatctccctggcgcagactgctgaaggcgcgctgagcgaagtgaacaacaacctgcagcgtatccgtgacctgaccgttcaggcacagaacagctccaactccgcgtccgatatcgactccatccaggctgaagttaaccagcgtatggaagagatcaaccgcgtgaccacccagaccgacttcaacggcattaaagtgctgaacaccggtaccggttcaagcagcta

SEQ ID NO: 118 - DNA, 504 bp, Kosakonia cowanii
  source 1..504: mol_type = genomic DNA
atggaagagatcaaccgcgtgaccacccagaccgacttcaacggcattaaagtgctgaacaccggtaccggttcaagcagctataacttccaggttggttctaaagataacgaaactatctccatcagcctgagcaagtctgactcctacaatctgtataacgccactggtgcaactgcggtaaccaccacccagaccatcaacggtaacgcacgttctacttctgctgaaggcttcgacgtactgaaaggtaccgttgactccactggcggtaccaacggtgctccgctggcagatatcgatgcggccatcaaagcagttgacgatcagcgcagcatgctgggtgcctcccagaaccgtttcgagtccaccatcactaacctgaacaacaccgtgagcaacctgtcagctgcccgcagccgtattcaggactccgactatgcgaccgaagtgtcgaacatgtcccgcgcgcagatcctgcagcaggccggttcttccgtgctg

SEQ ID NO: 119 - DNA, 677 bp, Kosakonia cowanii
  source 1..677: mol_type = genomic DNA
atggctgttattaatactaacaccctgtcgctgatgacccagaacaacctgactaaatctcagtcttctctgggtacatctattgagcgcctgtcttccggcctgcgtattaacagtgctaaagatgatgccgcgggccaggcaattgccaaccgctttacttctaacatcaatggcctgaccgttgctgcccgtaacgccaacgacggtatctctctggcacagaccgctgaaggcgcgctgagcgaaattaacaacaacctgcagcgtatccgtgacctgaccgttcaggcgcagaacagctccaactccgcgtctgatatcgactccatccaggctgaagttaaccagcgtatggaagaagtgaaccgcgtgaccacacagaccgacttcaacggcatcaaagtgctgaacaccggtaccggttcaagcagctacagcttccaggttggcgcgaaagatagcgaaactatctccatcagcctgaccaagtctgactcctacaacctgtacaatgcgaccggtgcaaccgcagcgactaccggccagaccatcaacggcaacaaacgttctactgccgctgaaggcttcgacgtactgaaaggtactgttgatgcgtccggtaacaccgatggtagcccgctggcggatatcgataaggccatcaaagcggttga

SEQ ID NO: 120 - DNA, 501 bp, Kosakonia cowanii
  source 1..501: mol_type = genomic DNA
gtgctgaacaccggtaccggttcaagcagctacagcttccaggttggcgcgaaagataacgaaactatctccatcagcctgaccaagtctgactcctacaacctgtacaacgccactggcgccactgcagcgactaccggccagaccatcaacggcaacaaacgtgccaccgctgctgaaggcttcgacgtactgaaaggtaccgttgatgcgtccggtaaaaccaacggtgctccgctggcagatatcgatgcggccatcaaagcggttgacgatcagcgcagcctgctgggtgcctcccagaaccgtttcgagtccaccatcactaacctgaacaacaccgtgagcaacctgtcagctgcccgcagccgtattcaggactccgactatgcgaccgaagtgtcgaacatgtcccgcgcgcagatcctgcagcaggctggttcttccgtgctggcacaggccaaccaggttccgcagactatgctgtccctgctgcgttaa

SEQ ID NO: 121 - DNA, 444 bp, Kosakonia cowanii
  source 1..444: mol_type = genomic DNA
aggcgcgctgagcgaagtgaacaacaacctgcagcgtatccgtgacctgaccgttcaggcgcagaacagctccaactccgcatctgacatcgactccatccaggctgaagttaaccagcgtatggaagagatcaaccgcgtgaccacccagaccgacttcaacggcattaaagtgctgaacaccggtaccggttcaagcagctacagcttccaggtcggttctaaagatagcgaaactatctccatcagcctgaccaagtctgactcctacaacctgtacaatgcgaccggtgcaacggcgcagactaccggccagaccatcaacggcaacaaacgttctactgccgctgaaggcttcgacgtactgaaaggtactgttgatgcgtccggtaacaccgatggtagcccgctggcggatatcgataaggccatcaaagcggttga

SEQ ID NO: 122 - DNA, 542 bp, Kosakonia cowanii
  source 1..542: mol_type = genomic DNA
cagaccgctgaaggcgcgctgagcgaagtgaacaacaacctgcagcgtatccgtgacctgaccgttcaggcgcagaacagctccaactccgcatctgacatcgactccatccaggctgaagttaaccagcgtatggaagagatcaaccgcgtgaccacccagaccgacttcaacggcattaaagtgctgaacaccggtaccggttcaagcagctacagcttccaggtcggttctaaagatagcgaaactatctccatcagcctgaccaagtctgactcctacaacctgtacaatgcgaccggtgcaacggcgcagactaccggccagaccatcaacggcaacaaacgttctactgccgctgaaggcttcgacgtactgaaaggtactgttgatgcgtccggtagcaccgatggcagcccgctggcagatatcgataaggccatcaaagcggttgacgatcagcgcagcctgctgggtgcctcccagaaccgtttcgagtccaccatcactaacctgaacaacaccgtgagcaacctgtcagc

SEQ ID NO: 123 - DNA, 1254 bp, Kosakonia cowanii
  source 1..1254: mol_type = genomic DNA
atgtcccaggttattaatactaacgcccttagcctcgtcgctcagaacaacctgaacaaatctcaggactctctgggtactgcaattgaacgtctctcttctggtctgcgtattaatagcgcgaaagacgatgcagcaggtcaggcgatctctaaccgtttcaccgccaacatcaacggtctgactcaggcttcccgtaacgccaacgatggtatctccatcgcgcagaccactgaaggcgcgctgaacgaaatcaacgacaacctgcagaacatccgtcgtctgtccgtacaggcacagaacggcaccaactccgattctgaccgtcagtccatccaggacgaaatcgatgcgcgtctggacgagatcaaccgtatctctgaacagaccgagttcaacggcgtgaaagtactgagcaaagaccagaagctctctatccaggttggttctaacgatggccagactatcgatatcgaactgaaccagatggactcttctactctgggtatggacggcttcagcgtagctaacggcattgacactactactctgactgcaagcaccggtacagtgaaagttgacagtggtttcgactacgatgcagctaaattcaccgacagtggcgcgaccgcagcaaccagcatcgacgatatcgtggttgatgataacggcgacgtgtttgcagtgaaaggcgctgaaatgtacgccgtaaccgaagatccgactactggtgaaatctccttcaactccgataacgacgttgccagctctgttgtgggcacaccgaccagcgttgttggtgaagatatgatgaaagaccaggctattaacatgaccggtatcaccggtacgttaatggaagatggtaaaggtaactactacgttgacgacggtgccggcaacctgactgaagcgactattgataccactacctggactgcaacggataccggtaaagctgtttctactactccggcaacttccgatccgctgaccaaaatcgacgaagcgctggcgcaggttgatgaaatgcgttccggtctgggtgcggtacagaaccgtttcgcgtctgttatcagcaacctgaacaacaccgttaacaacctgtctgaatcccgctctcgtattctggatgctgacttcgcgtctgaagtatctgaaatgagccgcgcgaacattctgcagtctgcaggcaccaccgtgctggcacaggctaaccaggttccgcagaacgtactgtccctgctgggctaa

SEQ ID NO: 124 - DNA, 909 bp, Kosakonia cowanii
  source 1..909: mol_type = genomic DNA
atggccgtcatcaataccaatacgctgtcactcatcaaccaaaataaccttaataaatcccaggcggcgcaaagctctgcaattcagcgtttatcctccggcctgcgtattaatagtgcgaaagatgatgctgcgggccaggcaattgccaaccgtttctcttccagcattagcggtatgggcgtggccgcaagaaatgccaacgatgctatttcgctggcacaaacggctgaaggtgcattaagcgaaatcaataacaacttgcagcgtatccgcgatctggccgtgcaggcgcaaaacagcactaactctgcctccgatgtcgactctattcagtcggaagtgaatgagcgtatggccgagattaaccgcgtgaccctgcagactgatttcaacggtatcaaaattctcaataccagctccggtacggccagttacggcttccatgtagggacagatgatggcgaagagattgttatcacgatgagcagcagcgatgactacaacctgggggcaaattccggttcgattggccaggtctctggcgaattcattcacggcaatgcacgcagcgtaaaagcagtcggctttgatgtgctccatggcaccgtcacccccttcagcggtgcgatactcaataatccgcttgccgccattgacgatgcgataaaagccgtcgatacccaacgcagttcgctcggggcatttcagaaccgctttgaatcgacgatcaataaccttaatcaggcggcgacgaatctttccgccgcgcgcagccgaatcaatgacgccgactatggcacggaagtgtcgaatatgagcagggcgcagatattacaacaggccggctcgtccgtgctggcgcaggccaaccaggtgccgcagaccatgctgtcgctgctgcgttaa

SEQ ID NO: 125 - DNA, 906 bp, Kosakonia cowanii
  source 1..906: mol_type = genomic DNA
atggctgttattaatactaacaccctgtcgctgatgacccagaacaacctgactaaatcacagtcttctctgggcacctcgattgagcgtctctcttccggtctgcgtatcaacagtgcaaaagatgatgctgctggtcaggcgatcgccaaccgtttcacctctaacatcaatggtcttaccgttgctgcccgtaacgctaacgacggtatctccctggcgcagactgctgaaggcgcgctgagcgaagtgaacaacaacctgcagcgtatccgtgacctgaccgttcaggcacagaacagctccaactccgcgtccgatatcgactccatccaggctgaagttaaccagcgtatggaagagatcaaccgcgtgaccacccagaccgacttcaacggcatcaaagtgctgaacaccggtaccggttcaagcagctataacttccaggttggttctaaagataacgaaactatctccatcagcctgagcaagtctgactcctacaacctctataacgccactggtgcaactgcggtaactaccacccagaccatcaacggtaacgcgcgttctacttctgctgaaggcttcgacgtactgaaaggtaccgttgactccactggcggtaccaacggtgctccgctggcagatatcgatgcggccatcaaagcagttgacgatcagcgcagcatgctgggtgcctcccagaaccgtttcgagtccaccatcactaacctgaacaacaccgtgagcaacctgtcagctgcccgcagccgtattcaggactccgactacgcgacggaagtgtcgaacatgtcccgcgcgcagatcctgcagcaggctggttcttctgtgctggcgcaggccaaccaggttccgcagaccatgctgtccctgctgcgttaa

SEQ ID NO: 126 - DNA, 784 bp, Kosakonia cowanii
  source 1..784: mol_type = genomic DNA
atggctgttattaatactaacaccctgtcgctgatgacccagaacaacctgactaaatcacagtcttctctgggcacctcgattgagcgtctctcttccggtctgcgtatcaacagcgcgaaagacgatgctgctggtcaggcgatcgcgaaccgctttacttctaacatcaacggcctgaccgttgctgcccgtaacgctaacgacggtatctctctggcacagaccgctgaaggcgcgctgagcgaagtgaacaacaacctgcagcgtatccgtgacctgaccgttcaggcgcagaacagctccaactccgcatctgacatcgactccatccaggctgaagttaaccagcgtatggaagagatcaaccgcgtgaccacccagaccgacttcaacggcattaaagtgctgaacaccggtaccggttcaagcagctacagcttccaggttggttctaaagatagcgaaactatctccatcagcctgaccaagtctgactcctacaacctgtacaatgcgactggtgcaacagcgcagactaccggccagaccatcaacggcaacaaacgttctactgccgctgaaggcttcgacgtactgaaaggtactgttgatgcgtccggtagcaccgatggcagcccgctggcagatatcgataaggccatcaaagcggttgacgatcagcgcagcctgctgggtgcctcccagaaccgtttcgaatccaccatcactaacctgaacaacaccgtgagcaacctgtcagctgcccgcagccgtattcagg

SEQ ID NO: 127 - DNA, 784 bp, Kosakonia cowanii
  source 1..784: mol_type = genomic DNA
atggctgttattaatactaacaccctgtcgctgatgacccagaacaacctgactaaatcacagtcttctctgggtacttctattgagcgtctctcttccggtctgcgtatcaacagtgcaaaagatgatgctgctggtcaggcaatcgccaaccgctttacttccaacatcaatggcctgggtgttgctgcccgtaacgccaacgacggtatctctctggcgcagaccgctgaaggcgcgctgagcgaagtgaacaacaacctgcagcgtatccgtgacctgaccgttcaggcacagaacagctccaactccgcatctgacatcgactccatccaggctgaagttaaccagcgtatggaagagatcaaccgcgtaaccacccagaccgacttcaacggcatcaaagtgctgaacaccggtaccggttcaagcagctacagcttccaggttggcgcgaaagataacgaaactatctccatcagcctgaccaagtctgactcctacaacctgtacaacgccactggcgccactgcagcgactaccggccagaccatcaacggcaacaaacgtgccaccgctgctgaaggcttcgacgtactgaaaggtaccgttgatgcgtccggtaaaaccaacggtgctccgctggcagatatcgatgcggccatcaaagcggttgacgatcagcgcagcctgctgggtgcctcccagaaccgtttcgagtccaccatcactaacctgaacaacaccgtgagcaacctgtcagctgcccgcagccgtattcagg

SEQ ID NO: 128 - DNA, 719 bp, Kosakonia cowanii
  source 1..719: mol_type = genomic DNA
atggctgttattaatactaacaccctgtcgctgatgactcagaacaacctgactaaatctcagtcttctctgggtacatctattgagcgcctgtcttccggcctgcgtattaacagtgctaaagatgatgccgcgggccaggcaattgccaaccgctttacttctaacatcaatggcctgaccgttgctgcccgtaacgccaacgacggtatctctctggcacagaccgctgaaggcgcgctgagcgaaattaacaacaacctgcagcgtatccgtgacctgaccgttcaggcgcagaacagctccaactccgcgtctgacatcgactccatccaggctgaagttaaccagcgtatggaagaagtgaaccgcgtgaccacccagaccgacttcaacggcatcaaagtgctgaacaccggtaccggttcaagcagctacagcttccaggttggcgcgaaagatagcgaaactatctccatcagcctgaccaagtctgactcctacaacctgtacaatgcgaccggtgcaaccgcagcgactaccggccagaccatcaacggcaacaaacgttctactgccgctgaaggcttcgacgtactgaaaggtactgttgatgcgtccggtaacaccgatggtagcccgctggcggatatcgataaggccatcaaagcagttgacgatcagcgcagcctgctgggtgcctcccagaaccgttttga

SEQ ID NO: 129 - DNA, 924 bp, Kosakonia cowanii
  source 1..924: mol_type = genomic DNA
atgcgtcttagcacaagttatatttttcaaaaccgcatagacagcctgggcgacgcgatgacgggttacaacgacctggcgacccgcctctctgctggccagacgctgctgaagccctctgacgatccaaccggcgcgtcgcagtctgtcactttacaaacggcgctgtcgcgcatgagccagttcgacaccgcgcgcacctacgcgcaggatgcgctgggccaggaagataacaccctggactctatcggcaacttgctgacagagaacctgacgcagaaagtgattgccggtggtaacggtgcttactctgacgaagatcgcgccgcgctggcggaagagttacagggcattcgcgacaacctgctggatctggcgaacaccaaaaacagtgacggtcgctacatttttgccggctataaaaccggcagcgcgccgttccaggccgatggcacctatgtcggtggcgataccgccatgacgcaggtggtctctgacagcaccgaaatgcaggtcggtcataccggctcagaggtgtttatgagcggcacaccggacgatctgtttgaagccctcgacaacgcgattgcgcagttgaaacagccggtcaccagcgatgccgacagggacgcgctgcaggctgtgctggatgattccaatgtcagcatcaagaagaatattgataacctcggcaaggtgcgcgccaccgtcggtaccaatatgcagcagattgaatcgttgggattcagcgctgaggctcaaagcatcaatgtgcagagccgcctgcaggaaaccttaggttcggactgggactcgatgattaccctgttatcccagtcaaagatgtcggaattcgcgcttaattcttccatgacggtatttcagtcgatgcagcagctctctattttcaaagtaatgggttga

SEQ ID NO: 130 - DNA, 906 bp, Kosakonia cowanii
  source 1..906: mol_type = genomic DNA
atggctgttattaatactaacaccctgtcgctgatgacccagaacaacctgactaaatcacagtcttctctgggcacctcgattgagcgtctctcttccggtctgcgtatcaacagtgcaaaagatgatgctgctggtcaggcgatcgccaaccgtttcacctctaacatcaatggtcttaccgttgctgcccgtaacgccaacgacggtatctccctggcgcagactgctgaaggcgcgctgagcgaagtgaacaacaacctgcagcgtatccgtgacctgaccgttcaggcacagaacagctccaactccgcgtccgatatcgactccatccaggctgaagttaaccagcgtatggaagagatcaaccgcgtaaccacccagaccgacttcaacggcattaaagtgctgaacaccggtaccggttcaagcagctataacttccaggttggttctaaagataacgaaactatctccatcagcctgagcaagtctgactcctacaacctgtataacgccactggtgcaactgcggtaaccaccacccagaccatcaacggtaacgcgcgttctacttctgctgaaggcttcgacgtactgaaaggtaccgttgactccactggcggtaccaacggtgctccgctggcagatatcgatgcggccatcaaagcagttgacgatcagcgcagcatgctgggtgcctcccagaaccgtttcgagtccaccatcactaacctgaacaacaccgtgagcaacctgtcagcggcacgcagccgtattcaggactccgactatgcgacggaagtgtcgaacatgtcccgcgcgcagatcctgcagcaggctggttcttccgtgctggcgcaggccaaccaggttccgcagaccatgctgtccctgctgcgttaa

SEQ ID NO: 131 - DNA, 743 bp, Kosakonia cowanii
  source 1..743: mol_type = genomic DNA
atggctgttattaatactaacaccctgtcgctgatgacccagaacaacctgactaaatcacagtcttctctgggcacctcgattgagcgtctctcttccggtctgcgtatcaacagcgcgaaagacgatgctgctggtcaggcgatcgcgaaccgctttacttctaacatcaacggcctgaccgttgctgcccgtaacgctaacgacggtatctctctggcacagaccgctgaaggcgcgctgagcgaagtgaacaacaacctgcagcgtatccgtgacctgaccgttcaggcgcagaacagctccaactccgcatctgacatcgactccatccaggctgaagttaaccagcgtatggaagagatcaaccgcgtgaccacccagaccgacttcaacggcattaaagtgctgaacaccggtaccggttcaagcagctacagcttccaggtcggttctaaagatagcgaaactatctccatcagcctgaccaagtctgactcctacaacctgtacaatgcgactggtgcaacagcgcagactaccggccagaccatcaacggcaacaaacgttctactgccgctgaaggcttcgacgtactgaaaggtactgttgatgcgtccggtagcaccgatggcagcccgctggcagatatcgataaggccatcaaagcggttgacgatcagcgcagcctgctgggtgcgtcccagaaccgtttcgagtccaccatcactaacctgaacaa

SEQ ID NO: 132 - DNA, 1254 bp, Kosakonia cowanii
  source 1..1254: mol_type = genomic DNA
atgtcccaggttattaatactaacgcccttagcctcgtcgctcagaacaacctgaacaaatctcaggactctctgggtactgcaattgaacgtctctcttctggtctgcgtattaatagcgcgaaagacgatgcagcaggtcaggcgatctctaaccgtttcaccgccaacatcaacggtctgactcaggcttcccgtaacgccaacgatggtatctccatcgcgcagaccactgaaggcgcgctgaacgaaatcaacgacaacctgcagaacatccgtcgtctgtccgtacaggcacagaacggcaccaactccgattctgaccgtcagtccatccaggacgaaatcgatgcgcgtctggacgagatcaaccgtatctctgaacagaccgagttcaacggcgtgaaagtactgagcaaagaccagaagctctctatccaggttggttctaacgatggccagactatcgatatcgaactgaaccagatggactcttctactctgggtatggacggcttcagcgtagctaacggcattgacactactactctgactgcaagcaccggtacagtgaaagttgacagtggtttcgactacgatgcagctaaattcaccgacagtggcgcgaccgcagcaaccagcatcgacgatatcgtggttgatgataacggcgacgtgtttgcagtgaaaggcgctgaaatgtacgccgtaaccgaagatccgactactggtgaaatctccttcaactccgataacgacgttgccagctctgttgtgggcacaccgaccagcgttgttggtgaagatatgatgaaagaccaggctattaacatgaccggtatcaccggtacgttaatggaagatggtaaaggtaactactacgttgacgacggtgccggcaacctgactgaagcgactattgataccactacttggactgcaacggataccggtaaagctgtttctactactccggcaacttccgatccgctgaccaaaatcgacgaagcgctggcgcaggttgatgaaatgcgttccggtctgggtgcggtacagaaccgtttcgcgtctgttatcagcaacctgaacaacaccgttaacaacctgtctgaatctcgctctcgtattctggatgctgacttcgcgtctgaagtatctgaaatgagccgcgcgaacattctgcagtctgcaggcaccaccgtgctggcacaggctaaccaggttccgcagaacgtgctgtctctgctgggctaa

SEQ ID NO: 133 - DNA, 924 bp, Kosakonia cowanii
  source 1..924: mol_type = genomic DNA
atgcgtcttagcacaagttatatttttcaaaaccgcatagacagcctgggcgacgcgatgacgggttacaacgacctggcgacccgcctctctgctggccagacgctgctgaagccctctgacgatccgaccggcgcgtcgcagtctgttactttacaaacggcgctgtcgcgcatgagccagttcgacaccgcgcgcacctacgcgcaggatgcgctgggccaggaagataacaccctggactctatcggcaacttgctgacagagaacctgacgcagaaagtgatcgccggtggtaacggtgcttactctgacgaagatcgcgccgcgctggcggaagagttacagggcatccgcgacaacctgctggatctggcgaacaccaaaaacagtgacggtcgctacatttttgccggctataaaaccggcagcgcgccgttccaggccgatggcacctatgtcggcggcgataccgccatgacgcaggtggtctctgacagcaccgaaatgcaggtcggtcataccggatcagaggtgtttatgagcggcacgccggacgatctgtttgaagccctcgacaacgcgattgcgcagttgaaacagccggtcaccagcgatgccgacagggacgcgctgcaggctgtgctggatgattccaatgtcagcatcaagaagaatattgataacctcggcaaggtgcgcgccaccgtcggtaccaatatgcagcagattgaatcgttgggattcagcgctgaggctcaaagcatcaatgtgcagagccgcctgcaggaaaccttaggttcggactgggactcgatgattaccctgttatcccagtcaaagatgtcggaattcgcgcttaattcttccatgacggtatttcagtcgatgcagcagctctctattttcaaagtaatgggttga

SEQ ID NO: 134 - DNA, 469 bp, Kosakonia cowanii
  source 1..469: mol_type = genomic DNA
atggctgttattaatactaacaccctgtcgctgatgacccagaacaacctgactaaatcacagtcttctctgggtacttctattgagcgtctctcttccggtctgcgtatcaacagtgcaaaagatgatgctgctggtcaggcaatcgccaaccgctttacttccaacatcaatggcctgggtgttgctgcccgtaacgccaacgacggtatctctctggcgcagaccgctgaaggcgcgctgagcgaagtgaacaacaacctgcagcgtatccgtgacctgaccgttcaggcacagaacagctccaactccgcatctgacatcgactccatccaggctgaagttaaccagcgtatggaagagatcaaccgcgtaaccacccagaccgacttcaacggcatcaaagtgctgaacaccggtaccggttcaagcagctacagcttccaggttggcgcgaaagataacgaaa

SEQ ID NO: 135 - DNA, 743 bp, Kosakonia cowanii
  source 1..743: mol_type = genomic DNA
atggctgttattaatactaacaccctgtcgctgatgactcagaacaacctgactaaatctcagtcttctctgggtacatctattgagcgcctgtcttccggcctgcgtattaacagtgctaaagatgatgccgcgggccaggcaattgccaaccgctttacttctaacatcaatggcctgaccgttgctgcccgtaacgccaacgacggtatctctctggcacagaccgctgaaggcgcgctgagcgaaattaacaacaacctgcagcgtatccgtgacctgaccgttcaggcgcagaacagctccaactccgcgtctgacatcgactccatccaggctgaagttaaccagcgtatggaagaagtgaaccgcgtgaccacccagaccgacttcaacggcatcaaagtgctgaacaccggtaccggttcaagcagctacagcttccaggttggcgcgaaagatagcgaaactatctccatcagcctgaccaagtctgactcctacaacctgtacaatgcgaccggcgcaaccgcagcgactaccggccagaccatcaacggcaacaaacgttctactgccgctgaaggcttcgacgtactgaaaggtactgttgatgcgtccggtaacaccgatggtagcccgctggcagatatcgataaggccatcaaagcggttgacgatcagcgcagcctgctgggtgcgtcccagaaccgtttcgagtccaccatcactaacctgaacaa

SEQ ID NO: 136 - DNA, 248 bp, Kosakonia cowanii
  source 1..248: mol_type = genomic DNA
agcccgctggcagatatcgataaggccatcaaagcggttgacgatcagcgcagcctgctgggtgcgtcccagaaccgtttcgagtccaccatcactaacctgaacaacaccgtgagcaacctgtcagcggcccgcagccgtattcaggactccgactacgcgaccgaagtgtcgaacatgtcccgcgcgcagatcctgcagcaggccggttcttccgtgctggcacaggccaaccaggttccgcagac

SEQ ID NO: 137 - DNA, 252 bp, Kosakonia cowanii
  source 1..252: mol_type = genomic DNA
gataaggccatcaaagcggttgacgatcagcgcagcctgctgggtgcgtcccagaaccttttcgagtccaccatcactaacctgaacaacaccgtgatcaacctgtcagcggccctcagccgtattcaggactccgactacgcgaccgaattgtcgaacatgtcccgcgcgcagatcctgcagcaggccgtttcttccgttctggcacaggccaaccaggttccgcagactatgctgtccctgctgcgttaa

SEQ ID NO: 138 - DNA, 860 bp, Kosakonia cowanii
  source 1..860: mol_type = genomic DNA
atggctgttattaatactaacaccctgtcgctgatgacccagaacaacctgactaaatctcagtcttctctgggtacatctattgagcgcctgtcttccggcctgcgtattaacagtgctaaagatgatgccgcgggccaggcaattgccaaccgctttacttctaacatcaatggcctgaccgttgctgcccgtaacgccaacgacggtatctctctggcacagaccgctgaaggcgcgctgagcgaaattaacaacaacctgcagcgtatccgtgacctgaccgttcaggcgcagaacagctccaactccgcgtctgatatcgactccatccaggctgaagttaaccagcgtatggaagaagtgaaccgcgtgaccacacagaccgacttcaacggcatcaaagtgctgaacaccggtaccggttcaagcagctacagcttccaggttggcgcgaaagatagcgaaactatctccatcagcctgaccaagtctgactcctacaacctgtacaatgcgaccggtgcaaccgcagcgactaccggccagaccatcaacggcaacaaacgttctactgccgctgaaggcttcgacgtactgaaaggtactgttgatgcgtccggtaacaccgatggtagcccgctggcggatatcgataaggccatcaaagcggttgacgatcagcgcagcctgctgggtgcctcccagaaccgtttcgagtccaccatcactaacctgaacaacaccgtgagcaacctgtcagcggcccgcagccgtattcaggactccgactatgcgacggaagtgtcgaacatgtcccgcgcgcagatcctgcagcaggccggttcttccgtgctggc

SEQ ID NO: 139 - DNA, 1245 bp, Kosakonia cowanii
  source 1..1245: mol_type = genomic DNA
atgtcccaggttattaatactaacgcccttagcctcgtcgctcagaacaacctgaacaaatctcaggactctctgggtactgcaattgaacgtctctcttctggtctgcgtattaatagcgcgaaagacgatgcagcaggtcaggcgatctctaaccgtttcaccgccaacatcaacggtctgactcaggcttcccgtaacgccaacgatggtatctccattgcacagaccactgaaggcgcgctgaacgaaatcaacgacaacctgcagaacatccgtcgtctgtccgtacaggcacagaacggcaccaactccgattctgaccgtcagtccatccaggacgaaatcgacgcgcgtctggacgagatcaaccgtatctctgaacagaccgagttcaacggcgtgaaagtactgagcaaagatcagaagctctctatccaggttggttctaacgatggtcagactatcgatatcgaactgaaccagatggatgcctctactctcggtatggacggcttcaccgttgcaagcggtgttgatgctactaaactgaccacaaccactgatattaatgtcaaagttgccgttgctgatgatctgagcaacgttaccgactctgcgggtggtactgttgctgcagaagaagtggtaaccggctctgacggtaaaacctatgttgttggtgacgatggtaactactacgaagcaaaagcaaatgctgctggtgacggtatcgaatttgacaccggtactgttgcaaccactactggtgtaaccatgagctccgataaatcaggctcttctgttagcgtaactcagacggctgatttgggttctctgactgaagatctggtaacggatggtgaaggtaacttctacctgcaagatgctaacggcagcgtatatgaagcaaccgctgacgcaaccggcgcggtgaccaaaggtgaaagactttctaccgctgcggccactgacgatccgctgaccaaaattgacgacgcgctggcgcaggttgatgaaatgcgttccggtctgggtgcggtacagaaccgtttcgcgtctgttatcagcaacctgaacaacaccgttaacaacctgtctgaatcccgctctcgtattctggatgctgacttcgcgtctgaagtatctgaaatgagccgcgcaaacattctgcagtctgcaggcaccaccgtgctggcacaggctaaccaggttccgcagaacgtgctgtccctgctgggctaa

SEQ ID NO: 140 - DNA, 909 bp, Kosakonia cowanii
  source 1..909: mol_type = genomic DNA
atggccgtcatcaataccaatacgctgtcactcatcaaccagaataaccttaataaatcccaggcggcgcaaagctctgcaattcagcgtttatcctccggcctgcgtattaacagcgcgaaagatgacgctgcgggccaggcgattgccaaccgtttctcctccagcattaacggcatgggcgtggccgcaagaaatgccaacgatgctatttcgctggcacaaacggctgaaggcgcattaagcgaaataaataacaacttgcagcgtatccgcgatctggccgtgcaggcgcaaaatagcactaactctgcctccgatatcgactctattcagtcggaagtgaatgaacgcatggccgagattaatcgcgtaacccgccagacagactttaacggcatcaaaattcttgatagcggctctggttcgtttggttacggcttccaggtgggtgctgatgatggcgaagagattgttctcacgataggtggcagcgatgactataacctgggggcaaattccggttcgattggcgaagtctctggcgaatctatccacggtagcgcgcgtagcgtaaaagcaatgggctttgatgtgctccatggcaccgtcaccccctttagcggtgcgatactcaataatccgcttgccgccatcgacgatgcgataaaagccgtcgatacccaacgcagttcgctcggggcatttcagaaccgctttgaatcgacgataaacaacctcaatcaggcggcgaacagtctctccgctgcgcgcagccgaataaatgacgccgactatggtacggaggtctcaaatatgagcagggcgcaaatattacaacaggccggctcgtccgtgctggcgcaggccaaccaggtgccgcagaccatgctgtcgctgctgcgttaa

SEQ ID NO: 141 - DNA, 789 bp, Kosakonia cowanii
  source 1..789: mol_type = genomic DNA
atggctgttattaatactaacaccctgtcgctgatgactcagaacaacctgactaaatctcagtcttctctgggcaccgctattgagcgcctgtcttccggtctgcgtatcaacagtgcgaaagatgatgccgcgggccaggctatcgccaaccgctttacttccaatatcaatggcctgtccgtcgcagcgcgtaacgccaacgacggtatctcgctggcacagaccgctgaaggcgcgctgggcgaaatcaacaacaacctgcagcgtatccgtgacctgaccgttcaggcacagaacagctctaactccgcgtccgatgtcgactccatccaggctgaagttaaccagcgtatggaagagatcaaccgcgtgaccacccagaccgacttcaacggcatcaaagtgctgaacaccggtaccggcaccagcagctacagcttccaggttggcgcgaaagataacgaaactatctctatcagcctgagctcctctaacgcctacaacctgtacaacgccaccggcgccactgcacagactaccggccagaccatcaacggtaatgcccgtagcaccgcagccgaaggcttcgatgtgcttcagggtaccgtaagcagcggcggcgttaccaacggctctccgctggcggatatcgatgcggcgatcaaatcggttgactcccagcgcagcctgctgggtgcgtcccagaaccgttttgaatccaccatcaccaacctgaacaacaccgtgagcaacctgtcgtctgcccgcagccgtattcaggactcc

SEQ ID NO: 142 - DNA, 405 bp, Kosakonia cowanii
  source 1..405: mol_type = genomic DNA
acgacccagaacaacctgactaaatcacagtcttctctgggcaccgctattgagcgtctctcttccggtctgcgtatcaacagtgcaaaagatgatgctgctggtcaggcgatcgcaaaccgtttcacctccaacatcaatggtctgggtgttgcagcgcgtaacgccaacgacggtatctccctggcacagaccgctgaaggcgcgctgggcgaaatcaacaacaacttacagcgtatccgtgacctgaccgttcaggcacagaacagctccaactccgcgtccgacatcgactccatccaggctgaagttaaccagcgtatggaagaagtgaaccgcgtgaccacccagaccgacttcaacggcatcaaagtgctgaacaccggtaccggcagcagcagctac

SEQ ID NO: 143 - DNA, 372 bp, Kosakonia cowanii
  source 1..372: mol_type = genomic DNA
aacagctccaactccgcgtccgacatcgactccatccaggctgaagttaaccagcgtatggaagaagtgaaccgcgtgaccacccagaccgacttcaacggcatcaaagtgctgaacaccggtaccggcagcagcagctacagcttccaggttggcgcgaaagataacgaaactatctctatcagcctgagctcttccaactcttacaacctgtacaacgccaccggcgctactgcacagactaccggccagaccatcaacggtaatgcccgtagcaccgcagctgaaggcttcgatgtgcttcagggtaccgtaagcagcggcggcgctaccaacggctctccgctggcagatatcgatgcggcgatcaaa

SEQ ID NO: 144 - DNA, 406 bp, Kosakonia cowanii
  source 1..406: mol_type = genomic DNA
gaccgacttcaacggcatcaaagtgctgaacaccggtaccggcagcagcagctacgacttccaggtgggttctaaagacaacgaaaagatctccatcagcctgagttcttccaactcttacaacctgtacaacgccaccggcgccactgcacagactaccggccagaccatcaacggcaacgcccgtgctactgcagctgaaggcttcgatgtgcttcagggtaccgtaagcagcggcggcgctaccgacggctctccgctggcggatatcgatgcggcgatcaaatcagttgactcccagcgcagcctgctgggtgcgtcccagaaccgttttgaatccaccatcaccaacctgaacaacaccgtgagcaacctgtcgtctgcccgcagccgtattcaggactcc

SEQ ID NO: 145 - DNA, 924 bp, Kosakonia cowanii
  source 1..924: mol_type = genomic DNA
atgcgtcttagcacaagttatatttttcaaaaccgcatagacagcctgggcgacgcgatgacgggttacaacgacctggcaacccgcctctctgctggccagacgctgctgaagccctctgacgatccgaccggcgcgtcacagtctgtcaccttacaaacggcgctgtcgcgcatgagccagtacgacaccgcgcgcacctacgcacaggatgcactgggccaggaagataacaccctggactctatcggcaacttgctgacagagaacctgacgcagaaagtgattgccggtggtaacggtgcctactctgacgaagatcgcgctgcgctggcggaagagttacagggcatccgcgataacctgctggatctggcgaacactaaaaacagcgacggtcgctatatttttgccgggtacaaaaccggcagtgcgccgttccaggccgatggcacctatgtcggcggcgataccgctatgacccaggtggtctctgacagcactgaaatgcaggttggccataccggtgatgatgtctttctgagcggtacgccggacgatctgtttaaagccctcgacaacgcgattgcgcagctgaaacagccgatcaccagcgatgcggacagggatgcgctacaggctgtgctggatgattccaatgtcagcattaagaaaaatatcgataacctcggcaaggttcgcgccaccgtcggtaccaatatgcagcagattgaatcactgggattcagcgctgaggcacaaagcatcaatgtgcagagccgcctgcaggaaaccttaggttcggactgggattcgatgattaccctgttatcccagtcgaagatgtcggaatttgcgcttaattcctccatgacggtatttcagtcgatgcagcagctctcaatttttaaagtaatgggctga

SEQ ID NO: 146 - DNA, 357 bp, Kosakonia cowanii
  source 1..357: mol_type = genomic DNA
atggctgttattaatactaacaccctgtcgctgacgacccagaacaacctgactaaatcacagtcttctctgggtactgctattgagcgtctctcttccggtctgcgtatcaacagtgcaaaagatgatgctgctggtcaggcaatcgccaaccgctttacttccaacatcaatggcctgggtgttgctgcccgtaacgccaacgacggtatctccctggcacagaccgctgaaggcgcgctgggcgaaatcaacaacaacctgcagcgtatccgtgacctgaccgttcaggcacagaacagctccaactccgcgtccgacatcgactccatccaggctgaagttaaccagcgtatg

SEQ ID NO: 147 - DNA, 370 bp, Kosakonia cowanii
  source 1..370: mol_type = genomic DNA
gtgaccacccagaccgacttcaacggcattaaagtgctgaacaccggtaccggcaccagcagctacagcttccaggttggcgcgaaagataacgaaactatttctatcggcctgagctcttccaacgcttacaacctgtacaacgccaccggcgccactgcacagactaccggccagaccatcaacggtaacgcccgtgctactgcagctgaaggcttcgatgtgcttaagggtacagtaagcagcggcggcgctaccgacggctctccgctggcggatatcgatgcggcgatcaaatcggttgactcccagcgcagcctgctgggtgcgtcccagaaccgtttcgaatccaccatcaccaacctgaaca

SEQ ID NO: 148 - DNA, 357 bp, Kosakonia cowanii
  source 1..357: mol_type = genomic DNA
atggctgttattaatactaacaccctgtcgctcacgacccagaacaacctgactaaatcacagtcttctctgggtaccgctattgagcgcctctcttccggtctgcgtatcaacagtgcaaaagatgatgctgctggtcaggcaatcgccaaccgctttacttccaacatcaatggcctgggtgttgctgcccgtaacgccaacgacggtatctcgctggcacagaccgctgaaggcgcgctgggcgaaatcaacaacaacctgcagcgtatccgtgacctgaccgttcaggcacagaacagctccaactccgcgtccgacatcgactccatccaggctgaagttaaccagcgtatg

SEQ ID NO: 149 - DNA, 279 bp, Kosakonia cowanii
  source 1..279: mol_type = genomic DNA
accgacggctctccgctggcggatatcgatgcggcgatcaaatcggttgactcccagcgcagcctgctgggtgcgtcccagaaccgtttcgaatccaccatcaccaacctgaacaacaccgtgagcaacctgtcgtctgcccgcagccgtattcaggactccgactatgcgaccgaagtgtcgaacatgtcccgcgcgcagatcctgcagcaggccggttcttccgtactggcccaggccaaccaggttccgcagaccatgctgtccctgctgcgttaa

SEQ ID NO: 150 - DNA, 453 bp, Kosakonia cowanii
  source 1..453: mol_type = genomic DNA
atggctgttatcaatactaacaccctgtcgctcacgactcagaacaacctgactaaatcacagtcttctctgggtaccgctattgagcgtctctcttccggtctgcgtatcaacagtgcaaaagatgatgctgctggtcaggcgatcgccaaccgtttcacctccaacatcaatggcctgggtgttgctgcccgtaacgccaacgacggtatctccctggcacagaccgctgaaggcgcgctgggcgaaatcaacaacaacttacagcgtatccgtgacctgaccgttcaggcacagaacagctccaactctgcgtccgacatcgactccatccaggctgaagttaaccagcgtatggaagaagtgaaccgcgtgaccacccagaccgacttcaacggcatcaaagtgctgaacaccggtaccggcagcagcagctacgacttccaggtgggt

SEQ ID NO: 151 - DNA, 1251 bp, Kosakonia cowanii
  source 1..1251: mol_type = genomic DNA
atgtcccaggttattaatactaacgcccttagcctcgtcgctcagaacaacctgaacaaatctcaggactctctgggtactgcaattgaacgtctctcttctggtctgcgtattaatagcgcgaaagacgatgcagcaggtcaggcaatctctaaccgtttcaccgccaacatcaacggtctgactcaggcttcccgtaacgccaacgatggtatctccattgcacagaccactgaaggcgcgctgaacgaaatcaacgacaacctgcagaacatccgtcgtctgtccgtacaggctcagaacggcaccaactcagattctgaccgtcagtccatccaggacgaaatcgacgcgcgtctggacgagatcaaccgtatctctgaacagaccgagttcaacggcgtgaaagtactgagcaaagaccagaagctctctatccaggttggttctaacgatggccagactatcgatatcgaactgaaccagatggactcttctactctgggtatggacggtttcagcgtagctaacggcatcgaccctactactctgactgcaagcaccggtacagtgaaagttgacagtggtttcgactacgatgttgctaattttactgataccgcgggtactgctaccgcagttgacgatatcgtggttgacgataacggtgacgtctatgcgcaggttggcgctgaaatgtacgccgtaactgaagatccgactactggtgagatctccttcgactccggtactgacgtttctggctccgttgtaggcacaccgaccagcgttgctggtgaagatatgatgaaagatcagactgttgatatgacaggcatcaccggtacgttaatggaagatggccagggtaactactacgttgacgatggtgccggcaacctgactgaagcgactattgataccactacctgggctgcaacggataccggtaaagctgtttctactactccggcaacttccgatccgctgaccaaaatcgacgaagcgctggcgcaggttgatgaaatgcgttccggtctgggtgcggtacagaaccgtttcgcgtctgttatcagcaacctgaacaacaccgttaacaacctgtctgaatcccgctctcgtattctggatgctgacttcgcgtctgaagtatctgaaatgagccgcgcgaacattctgcagtctgcaggcaccaccgtgctggcacaggctaaccaggttccgcagaacgtgctgtctctgctgggctaa

SEQ ID NO: 152 - DNA, 924 bp, Kosakonia cowanii
  source 1..924: mol_type = genomic DNA
atgcgtcttagcacaagttatatttttcaaaaccgcatagacagcctgggcgacgcgatgacgggttacaacgacctggcgacccgcctctctgctggccagacgctgctgaagccctctgacgatccgaccggcgcgtcgcagtctgtcaccttacaaacggcgctgtcgcgcatgagccagttcgacaccgcgcgcacctacgcgcaggatgcgctgggccaggaagataacaccctggactctatcggcaacttgctgacagagaacctgacgcagaaagtgatcgccggtggtaacggtgcctactctgacgaagatcgcgccgcgctggcggaagagttacagggcatccgcgataacctactggatctggcgaacaccaaaaacagcgacgggcgttatatttttgccgggtataaaaccggtaacgcgccgttccaggccgatggcagctatgtcggcggcgataccgccatgacgcaggtggtctccgacagcaccgaaatgcaggtcggtcataccggttcagaggtgtttctgagcggcacgccggacgatctgtttcaagccctcgacagtgcgattgcgcaactgaaacagccggtcaccagcgatgcggacagggatgcgctgcaaggagtgctggatgatgccaatatcagcatcaagaaaaatattgataacctcggcaaggttcgcgccaccgtcggtaccaatatgcagcagattgaatcgctgggattcagcgctgagtcacaaagcatcaatgtgcagagccgtctgcaggaaacgttaggttcggactgggactcgatgattaccctgttatctcagtcaaagatgtctgagttcgcgcttaattcctccatgacggtatttcagtcgatgcagcagctctctatttttaaagtaatgggttga

SEQ ID NO: 153 - DNA, 948 bp, Kosakonia cowanii
  source 1..948: mol_type = genomic DNA
atggctgttattaatactaacacactgtcgctgatgacccagaacaacctgactaaatcacagtcttctctgggcacctctattgagcgtctctcttccggtctgcgtatcaacagcgcaaaagatgatgctgctggccaggcaattgccaaccgcttcacctccaacatcaacggtctgagcgttgcatcacgtaacgccaacgacggtatctctctggcgcagaccgctgaaggcgcgctgagcgaggtgaacaacaacctgcagcgtatccgtgacctgaccgttcaggcgcagaacagctccaactcggcgtctgacatcgactccatccagtctgaagtcaacgagcgtatgaaagagatcgaccgcgttaccacgcagaccgatttcaacggccagaaaatcctgaacaaccagactgctgccgctaaatcctacaacttccaggttggcgcgaaagatggcgaaactatcagcatctctatggacagcgctgctggctggaacctcgcttctgcaagtggttcaactaccgtatctccggctgctggcgtttaccacaacacccgtgctgctgcttctctggctaccgttgctggtaacgcccgtagcgttgctgcagttggttttgacgttgtctccggtaaaatctctggtgccgctgccggtactggctctccgctgaaagatatcgacgccgctatcaaagctgttgattctcagcgtagctccctgggggcttcccagaaccgtttcgaatctaccatcactaacctgagcaacacggtaagcaacctgtccgcagcgcgcagccgtattcaggattctgattacgcgaccgaagtttccaacatgtcccgcgcgcagatcctgcagcaggctggttcttctgtgctggcccaggccaaccaggttccgcagaccatgctgtccctgctgcgttaa

SEQ ID NO: 154 - DNA, 954 bp, Kosakonia cowanii
  source 1..954: mol_type = genomic DNA
atggctgttattaatactaacaccctctcgctgatgactcagaacaacctgactaaatcacagtcttctctgggcacctctattgagcgtctgtcttctggtctgcgtatcaacagcgcgaaagatgacgcagcgggtcaggcaattgccaaccgcttcacctccaacatcaacggtctgagcgttgcatcacgtaacgccaacgacggtatctcgctggcgcagaccgctgaaggcgcgctgagcgaagtgaacaacaacctgcagcgtatccgtgacctgaccgttcaggcgcagaacagctccaactccgcgtctgacatcgactccatccagtctgaagtcaacgagcgcatgaaagagatcgaccgcgttaccacgcagaccgatttcaacggccagaaaatcctgaacaaccagactgctgccgctaaatcctacaacttccaggttggcgcgaaagatggcgaaaccatcagcatctccatgaacggtgctgctggctggaacctggcttctgcgaaaactgacggcaccacgactactccgactgctggcggcacctacgcaaacacccgtgctgctgcttcgctggctaccgttgctggtaacgcccgtagcgttgctgcagttggttttgacgttgtctccggtaaaatctctggtgccgctgccggtactggctctccgctgaaagatatcgacgccgctatcaaagctgttgatactcagcgtagctccctgggtgcttcccagaaccgtttcgaatctaccatcactaacctgagcaacacggtaagcaacctgtccgcagcgcgcagccgtattcaggattctgattacgcgaccgaagtttccaacatgtcccgtgcgcagatcctgcagcaggctggttcttctgtgctggcccaggccaaccaggtgccgcagaccatgctgtccctgctgcgttaa

SEQ ID NO: 155 - DNA, 1254 bp, Kosakonia cowanii
  source 1..1254: mol_type = genomic DNA
atgtcccaggttattaatactaacgcccttagcctcgtcgctcagaacaacctgaataaatctcagggctctctgggtactgcaattcagcgtctctcttctggtctgcgtattaacagcgcgaaagacgatgcagcaggtcaggcgatctctaaccgtttcaccgcgaacatcaacggcctgagccaggcttcccgtaacgccaacgatggtatctccattgcacagaccactgaaggcgcgctgaacgaaatcaacgacaacctgcagaacatccgtcgtctgtccgtacaggcgcagaacggcaccaactccgattctgaccgtcagtccatccaggacgaaatcgacgcgcgtctggacgagatcaaccgtatctctgaacagactgagttcaacggcgtgaaagtgctgagcaaagatcagagcctctctattcaggtaggttctaacgatggtcagactatcgatatcgaactgagcaaaatggattccagcaccctgagcatggatggtttcagcgtagctaacggcattgacactactactctgactgcaagcactggtacagtaaaagttgacagtggtttcgactacgatgcgactaaattcaccgacggtggcgcggccccagtgaccagcatcgacgatatcgtagttgacgataacggcgacgtgtttgcagtgaaaggccctgaaatgtacgccgtaaccgaagatccgactactggtgaaatcaccttcgactccgatactgacgttgccagctctgttgtaggcacaccgaccagcgttgttggtgaagatatgatgaaagaccaggctattaacatgaccggtatcaccggtacgttaatggaagatggtaaaggtaactactacgttgacgacggtgccggcaacctgactgaagcaactattgataccactacctggactgcaacggataccggtaaagctgtttctactactccggcaacttccgatccgctgaccaaaatcgacgaagcgctggcgcaggttgatgaaatgcgttccggtctgggtgcggtacagaaccgtttcgcatctgttatcagcaacctgaacaacaccgttaacaacctgtctgaatcccgctctcgtattctggatgctgacttcgcgtctgaagtatctgaaatgagccgcgcgaacattctgcagtctgcaggcaccaccgtgctggcacaggctaaccaggttccgcagaacgtactgtctctgctgcgttaa

SEQ ID NO: 156 - DNA, 924 bp, Kosakonia cowanii
  source 1..924: mol_type = genomic DNA
atgcgtcttagcacaagttatatttttcaaaaccgcatagacagcctgggcgacgcgatgacgggttacaacgacctggcgacccgcctctctgctggccagacgctgctgaagccctctgacgatccaaccggcgcgtcgcagtctgtcactttacaaacggcgctgtcgcgcatgagccagttcgacaccgcgcgcacctacgcgcaggatgcgctgggccaggaagataacaccctggactctatcggcaacttgctgacagagaacctgacgcagaaagtgattgccggtggtaacggtgcttactctgacgaagatcgcgccgcgctggcggaagagttacagggcatccgcgacaacctgctggatctggcgaacaccaaaaacagcgacggtcgctacatttttgccggctataaaaccggcagcgcgccgttccaggtcgatggcacctatgtcggcggcgataccgccatgacgcaggtggtctctgacagcaccgaaatgcaggtcggtcataccggctcagaggtgtttatgagcggcacgccggacgatctgtttgaagccctcgacaacgcgattgcgcagttgaaacagccggtcaccagcgatgctgacagggacgcgctgcaggctgtgctggatgactccaatgtcagcatcaagaagaatattgataacctcggcaaggtgcgcgccaccgtcggtaccaatatgcagcagattgaatcgctgggattcagcgctgaggctcaaagcatcaatgtgcagagccgcctgcaggaaactttaggttcggactgggactcgatgattaccctgttatcccagtcaaagatgtcggaattcgcgcttaattcttccatgacggtatttcagtcgatgcagcagctctctattttcaaagtaatgggttga

SEQ ID NO: 157 - DNA, 906 bp, Kosakonia cowanii
  source 1..906: mol_type = genomic DNA
atggctgttattaatactaacaccctgtcgctgatgactcagaacaacctgactaaatctcagtcttctctgggcaccgctattgagcgcctgtcttccggtctgcgtatcaacagtgcgaaagatgatgccgcgggccaggctatcgccaaccgctttacttccaatatcaatggcctgtccgtcgcagcgcgtaacgccaacgacggtatctcgctggcacagaccgctgaaggcgcgctgggcgaaatcaacaacaacttacagcgtatccgtgacctgaccgttcaggcacagaacagctccaactccgcgtccgatgtcgactccatccaggctgaagttaaccagcgtatggaagagatcaaccgcgtgaccacccagaccgacttcaacggcatcaaagtgctgaacactggtaccggcaccagcagctacagcttccaggttggcgcgaaagataacgaaactatctctatcagcctgagctcctctaacgcctacaacctgtacaacgccaccggcgccactgcacagactaccggccagaccatcaacggtaatgcccgtagcaccgcagccgaaggcttcgatgtgcttcagggtaccgtaagcagcggcggcgttaccaacggctctccgctggcggatatcgatgcggcgatcaaatcggttgactcccagcgcagcctgctgggtgcgtcccagaaccgttttgaatccaccatcaccaacctgaacaacaccgtgagcaacctgtcgtctgcccgcagccgtattcaggactccgactatgcgaccgaagtgtcgaacatgtcccgcgcgcagatcctgcagcaggccggttcttccgtgctggcccaggccaaccaggttccgcagaccatgctctccctgctgcgttaa

SEQ ID NO: 158 - DNA, 909 bp, Kosakonia cowanii
  source 1..909: mol_type = genomic DNA
atggccgtcatcaataccaatacgctgtcactcatcaaccaaaataaccttaataaatcccaggcggcgcaaagctctgcaattcagcgtttatcctccggcctgcgtattaacagcgcgaaagatgacgctgcgggccaggcgattgccaaccgtttctcctccagcattaacggcatgggcgtggccgcaagaaatgccaacgatgctatttcgctggcacaaacggctgaaggcgcattaagcgaaataaataacaacttgcagcgtatccgcgatctggccgtgcaggcgcaaaatagcactaactctgcctccgatatcgactctattcagtcggaagtgaatgaacgcatggccgagattaatcgcgtaacccgccagacagactttaacggcatcaaaattcttgatagcggctctggttcgtttggttacggcttccaggtgggtgctgatgatggcgaagagattgttctcacgataggtggcagcgatgactataacctgggggcaaattccggttcgattggcgaagtctctggcgaatttatccacggtagcgcgcgtagcgtaaaagcaatgggctttgatgtgctccatggcaccgtcaccccctttagcggtgcgatactcaataatccgcttgccgccatcgacgatgccataaaagccgtcgatacccaacgcagttcgctcggggcatttcagaaccgctttgaatcgacgataaacaacctcaatcaggcggcgaacagtctctccgctgcgcgcagccgaataaatgacgccgactatggtacggaggtctcaaatatgagcagggcgcaaatattacaacaggccggctcgtccgtgctggcgcaggccaaccaggtgccgcagaccatgctgtcactgctgcgttaa

SEQ ID NO: 159 - DNA, 1251 bp, Kosakonia cowanii
  source 1..1251: mol_type = genomic DNA
atgtcccaggttattaatactaacgcccttagcctcgtcgctcagaacaacctgaataaatctcagggctctctgggtactgcaattcagcgtctctcttctggtctgcgtattaacagcgcgaaagacgatgcagcaggtcaggcgatctctaaccgtttcaccgccaacatcaacggcctgagccaggcttcccgtaacgccaacgatggtatctccattgcacagaccactgaaggcgcgctgaacgaaatcaacgacaacctgcagaacatccgtcgtctgtccgtacaggcgcagaacggcaccaactccgattctgaccgtcagtccatccaggacgaaatcgacgcgcgtctggacgagatcaaccgtatctctgaacagactgagttcaacggcgtgaaagtgctgagcaaagatcagagcctctctattcaggtaggttctaacgatggtcagactatcgatatcgaactgagcaaaatggattccagcaccctgagcatggatggtttcagcgtagctaacggcatcgaccctactaccctgactgcaagcaccggtacagtgaaagttgacagtggtttcgactacgatgttgctaattttactgataccgcgggtactgctaccgccgttgacgatatcgtggttgacgataacggtgacgtctacgcgaaggttggcgctgaaatgtacgccgtaactgaagatccgaccactggtgggatctccttcgactccagtactgacgtttctggctccgttgtaggcacaccgaccagcgttgttggtgaagatatgatgaaagaccagactgttgatatgaccggtatcaccggtacgttaatggaagatggtaaaggtaactactacgttgacgacggtgccggcaacctgactgaagcaactattgataccactacctggactgcaacggataccggtaaagctgtttctactactccggcaacttccgatccgctgaccaaaatcgacgaagcgctggcgcaggttgatgaaatgcgttccggtctgggtgcggtacagaaccgtttcgcgtctgttatcagcaacctgaacaacaccgttaacaacctgtctgaatcccgctctcgtattctggatgctgacttcgcgtctgaagtatctgaaatgagccgcgcgaacattctgcagtctgcaggcaccaccgtgctggcacaggctaaccaggttccgcagaacgttctgtctctgctgcgttaa

SEQ ID NO: 160 - DNA, 306 bp, Kosakonia cowanii
  source 1..306: mol_type = genomic DNA
atggctgttatcaatactaacaccctgtcgctcacgacccagaacaacctgactaaatcacagtcttctctgggcaccgctattgagcgtctctcttccggtctgcgtatcaacagtgcaaaagatgatgctgctggtcaggcgatcgcaaaccgtttcacctctaacatcaatggcctgggtgttgcagcgcgtaacgccaacgacggtatctccctggcacagaccgctgaaggcgcgctgggcgaaatcaacaacaacttacagcgtatccgtgacctgaccgttcaggcacagaacagctct

SEQ ID NO: 161 - DNA, 480 bp, Kosakonia cowanii
  source 1..480: mol_type = genomic DNA
aacatcaatggcctgggtgttgcagcgcgtaacgccaacgacggtatctccctggcacagaccgctgaaggcgcgctgggcgaaatcaacaacaacttacagcgtatccgtgacctgaccgttcaggcacagaacagctctaactccgcgtccgacatcgactccatccaggctgaagttaaccagcgtatggaagaagtgaaccgcgtgaccacccagaccgacttcaacggcatcaaagtgctgaacaccggtaccggcagcagcagctacagcttccaggttggcgcgaaagataacgatactatctctatcagcctgagctcttccatctcttacaacctgtacaacgccaccggcgccactgcacagactcccggccagaccatcaacggcaacgcccgtgctactgcagctgaaggcttcgatgtgcttcagggtaccgtaagcagcggcggcgctaccaacggctctccgctg

SEQ ID NO: 162 - DNA, 739 bp, Kosakonia cowanii
  source 1..739: mol_type = genomic DNA
gactaaatcacagtcttctctgggcaccgctattgagcgtctctcttccggtctgcgtatcaacagtgcaaaagatgatgctgctggtcaggcaattgctaaccgtttcacctccaacatcaatggcctgggtgttgcagcacgtaacgccaacgacggtatctccctggcacagaccgctgaaggcgcgctgggcgaaatcaacaacaacctgcagcgtatccgtgacctgaccgttcaggcacagaacagctccaactccgcgtccgacatcgactccatccaggctgaagttaaccagcgtatggaagaagtgaaccgcgtgaccacccagactgacttcaacggcatcaaagtgctgaacaccggtaccggcagcagcagctacgatttccaggtgggttctaaagacaacgaaaagatctccatcagcctgagctcttccaactcttacaacctgtacaacgccaccggcgccactgcacagactaccggccagaccatcaacggcaacgcccgtgctactgcagctgaaggcttcgatgtgcttcagggtaccgtaagcagcggcggcaccaccgacggctctccgctggcggatatcgatgcggcgatcaaatcggttgactcccagcgcagcctgctgggtgcgtcccagaaccgttttgaatccaccatcaccaacctgaacaacaccgtgagcaacctgtcatctgcccgcagccgtattcaggactcc

SEQ ID NO: 163 - DNA, 304 bp, Kosakonia cowanii
  source 1..304: mol_type = genomic DNA
gagctcttccaactcttacaacctgtacaacgccaccggcgccactgcacagactaccggccagaccatcaacggcaacgcccgtgctactgcagctgaaggcttcgatgtgcttcagggtaccgtaagcagcggcggcgctaccaacggctctccgctggcagatatcgatgcggcgatcaaatcggttgactcccagcgcagcctgctgggtgcgtcccagaaccgttttgaatccaccatcaccaacctgaacaacaccgtgagcaacctgtcatctgcccgcagccgtattcaggactcc

SEQ ID NO: 164 - DNA, 924 bp, Kosakonia cowanii
  source 1..924: mol_type = genomic DNA
atgcgtcttagcacaagttatatttttcaaaaccgcatagacagcctgggcgacgcgatgacgggttacaacgacctggcgacccgcctctctgctggccagacgctgctgaagccctctgacgatccgaccggcgcgtcgcagtctgtcacattacaaacggcgctgtcgcgcatgagccagtacgacaccgcgcgcacctacgcacaggatgcactgggccaggaagataacaccctggactctatcggcaacttgctgacagagaacctgacgcagaaagtgattgccggtggtaacggtgcctactctgacgaagatcgcgctgcgctggcggaagagttacagggcatccgcgataacctgctggatctggcgaacactaaaaacagcgacggtcgctatatttttgccgggtacaaaaccggcagcgcgccgttccaggccgatggcacctatgtcggcggcgataccgctatgacccaggtggtctctgacagcactgaaatgcaggttggccataccggtgatgatgtctttctgagcggtacgccggacgatctgtttaaagccctcgacaacgcgattgcgcagctgaaacagccgatcaccagcgatgcggacagggatgcgctacaggctgtgctggatgattccaatgtcagcattaagaaaaatatcgataacctcggcaaggttcgtgccaccgtcggtaccaatatgcagcagattgaatcactgggattcagcgctgaggcacaaagcatcaatgtgcagagccgcctgcaggaaaccctggggtcggactgggattcgatgattaccctgttatcccagtcaaagatgtcggaatttgcgcttaattcctccatgacggtatttcagtcgatgcagcagctctcaatttttaaagtaatgggctga

SEQ ID NO: 165 - DNA, 924 bp, Kosakonia cowanii
  source 1..924: mol_type = genomic DNA
atgcgtcttagcacaagttatatttttcaaaaccgcatagacagcctgggcgacgcgatgacgggttacaacgacctggcgacccgcctctctgctggccagacgctgctgaagccctctgacgatccgaccggcgcgtcgcagtctgtcactttacaaacggcgctgtcgcgcatgagccagttcgacaccgcgcgcacctacgcgcaggatgcattaggccaggaagataacaccctggactctatcggcaacttgctgacagagaacctgacgcagaaagtgattgccggtggtaacggtgcttactctgacgaagatcgcgccgcgctggcggaagagttacagggcatccgcgataacctgctggatctggcgaacaccaaaaacagtgacggtcgctatatttttgccggctataaaaccggcagcgcgccgttccaggccgatggcacctatgtcggcggcgataccgccatgacgcaggtggtctctgacagtaccgaaatgcaggtcggtcataccggctcagaggtgtttatgagcggcacgccggacgatctgtttgaagccctcgacaacgcgattgcgcagttgaaacagccggtcaccagcgatgccgacagggacgcgctgcaggctgtgctggatgattccaatgtcagcatcaagaagaatattgataacctcggcaaggtgcgcgccaccgtcggtactaatatgcagcagattgaatcgttgggattcagcgctgaggctcaaagcatcaatgtgcagagccgcctgcaggaaaccttaggttcggactgggactcgatgattaccctgttatcccagtcaaagatgtcggaattcgcgcttaattcttccatgacggtatttcagtcgatgcagcagctctctattttcaaagtaatgggttga

SEQ ID NO: 166 - DNA, 395 bp, Kosakonia cowanii
  source 1..395: mol_type = genomic DNA
gtgctgaacaccggttccggcaccagcacctataacttccaggtcggcgcgaaagacggcgagaagatcggtatcgacatcagctccagcgacagctacaacctggctgcagcgggctcttccggtactgcactgaacaccaaagccatggcttccggtgacaccgttaacggtacccagcgccagactcaggctgttggcttcgacgttctgaaaggtaaagtgaccggcggcgcgagcggtactgcttccggctccactccgctggctgatatcgatgcggcaatcaagtctgttgactcccagcgcagcctgctgggtgcgtcccagaaccgtttcgaatccaccatcactaacctgaacaacaccgtgagcaacctgtcgtctgcccgcag

SEQ ID NO: 167 - DNA, 380 bp, Kosakonia cowanii
  source 1..380: mol_type = genomic DNA
atggctgttattaatactaacaccctgtcgctgatgactcagaacaacctgactaaatctcagtcttctctgggtaccgctattgagcgcctgtcttccggtctgcgtatcaacagtgcgaaagatgatgctgctggtcaggctatcgctaaccgttttacctctaacatcaatggcctgggtgttgctgcccgtaacgccaacgacggtatctctctctcccagaccgctgaaggtgcgctgggcgaaatcaacaacaacctgcagcgtatccgtgacctgaccgttcaggcacagaacagctccaactccgcgtctgacatcgactccatccaggctgaagttaaccagcgtatggaagaagtgaaccgcgtgaccac

SEQ ID NO: 168 - DNA, 521 bp, Kosakonia cowanii
  source 1..521: mol_type = genomic DNA
atggctgttattaatactaacaccctgtcgctgacgacccagaacaacctgactaaatctcagtcttccctgggcactgcgatcgagcgtctctcttccggtctgcgtatcaacagtgcaaaagatgatgctgctggtcaggcgatcgctaaccgttttacctctaacatcaatggcctgggtgttgctgcccgtaacgccaacgacggtatctctctctcccagaccgctgaaggcgcgctgggcgaaatcaacaacaacctgcagcgtatccgtgacctgaccgttcaggcacagaacagctccaactccgcgtctgacatcgactccatccaggctgaagttaaccagcgtatggaagaagtgaaccgcgtaaccaaccagaccgacttcaacggcatcaaagtgctgaacaccggttccggcaccagcacctataacttccaggtcggcgcgaaagacggcgagaagatcggtatcgacatcagctccagcgacagctacaacctggctgcagcggg

SEQ ID NO: 169 - DNA, 924 bp, Kosakonia cowanii
  source 1..924: mol_type = genomic DNA
atgcgtcttagcacaagttatatttttcaaaaccgcatagacagcctgggcgacgcgatgacgggttacaacgacctggcgacccgcctctctgctggccagacgctgctgaagccctctgacgatccgaccggcgcgtcgcagtctgtcactttacaaacggcgctgtcgcgcatgagccagttcgacaccgcgcgcacctacgcgcaggatgcgctgggccaggaagataacaccctggactctatcggcaacttgctgacagagaacctgacgcagaaagtgattgccggtggtaacggtgcttactctgacgaagatcgcgccgcgctggcggaagagctacagggcatccgcgacaacctgctggatctggcgaacaccaaaaacagtgacggtcgctatatttttgccggctataaaaccggcagcgcgccgttccaggccgatggcacctatgtcggtggcgataccgccatgacgcaggtggtctctgacagcaccgaaatgcaggtcggtcataccggctcagaggtgtttatgagcggcacaccggacgatctgtttgaagccctcgacaacgcgattgcgcagttgaaacagccggtcaccagcgatgctgacagggacgcgctgcaggctgtgctggatgattccaatgtcagcatcaagaagaatattgataacctcggcaaggtgcgcgccaccgtcggtaccaatatgcagcagattgaatcgttgggattcagcgctgaggctcaaagcatcaatgtgcagagccgcctgcaggaaaccttaggttcggactgggactcgatgattaccctgttatcccagtcaaagatgtcggaattcgcgcttaattcttccatgacggtatttcagtcgatgcagcagctctctattttcaaagtaatgggttga

SEQ ID NO: 170 - DNA, 906 bp, Kosakonia cowanii
  source 1..906: mol_type = genomic DNA
atggctgttattaatactaacaccctgtcgctgatgacccagaacaacctgactaaatcacagtcttctctgggcacctcgattgagcgtctctcttccggtctgcgtatcaacagtgcaaaagatgatgctgctggtcaggcgatcgccaaccgtttcacctctaacatcaatggtcttaccgttgctgcccgtaacgccaacgacggtatctccctggcgcagactgctgaaggcgcgctgagcgaagtgaacaacaacctgcagcgtatccgtgacctgaccgttcaggcacagaacagctccaactccgcgtccgatatcgactccatccaggctgaagttaaccagcgtatggaagagatcaaccgcgtgaccacccagaccgacttcaacggcattaaagtgctgaacaccggtaccggttcaagcagctataacttccaggttggttctaaagataacgaaactatctccatcagcctgagcaagtctgactcctacaacctctataacgccactggtgcaactgcggtaaccaccacccagaccatcaacggtaacgcgcgttctacttctgctgaaggcttcgacgtactgaaaggtaccgttgactccactggcggtaccaacggtgctccgctggcagatatcgatgcggccatcaaagcagttgacgatcagcgcagcatgctgggtgcctcccagaaccgtttcgagtccaccatcactaacctgaacaacaccgtgagcaacctgtcagcggcacgcagccgtattcaggactccgactatgcgacggaagtgtcgaacatgtcccgcgcgcagatcctgcagcaggctggttcttccgtgctggcgcaggccaaccaggttccgcagaccatgctgtccctgctgcgttaa

SEQ ID NO: 171 - DNA, 906 bp, Kosakonia cowanii
  source 1..906: mol_type = genomic DNA
atggctgttattaatactaacaccctgtcgctgatgacccagaacaacctgactaaatcacagtcttctctgggcacctcgattgagcgtctctcttccggtctgcgtatcaacagcgcgaaagacgatgctgctggtcaggcgatcgcgaaccgctttacttctaacatcaacggcctgaccgttgctgcccgtaacgctaacgacggtatctctctggcacagaccgctgaaggcgcgctgagcgaagtgaacaacaacctgcagcgtatccgtgacctgaccgttcaggcgcagaacagctccaactccgcatctgacatcgactccatccaggctgaagttaaccagcgtatggaagagatcaaccgcgtgaccacccagaccgacttcaacggcattaaagtgctgaacaccggtaccggttcaagcagctacagcttccaggtcggttctaaagatagcgaaactatctccatcagcctgaccaagtctgactcctacaacctgtacaatgcgactggtgcaacagcgcagactaccggccagaccatcaacggcaacaaacgttctactgccgctgaaggcttcgacgtactgaaaggtactgttgatgcgtccggtagcaccgatggcagcccgctggcagatatcgataaggccatcaaagcggttgacgatcagcgcagcctgctgggtgcgtcccagaaccgtttcgagtccaccatcactaacctgaacaacaccgtgagcaacctgtcagcggcccgcagccgtattcaggactccgactacgcgaccgaagtgtcgaacatgtcccgcgcgcagatcctgcagcaggccggttcttccgtgctggcacaggccaaccaggttccgcagaccatgctgtccctgctgcgttaa

SEQ ID NO: 172 - DNA, 906 bp, Kosakonia cowanii
  source 1..906: mol_type = genomic DNA
atggctgttattaatactaacaccctgtcgctgatgacccagaacaacctgactaaatcacagtcttctctgggtacttctattgagcgtctctcttccggtctgcgtatcaacagtgcaaaagatgatgctgctggtcaggcaatcgccaaccgctttacttccaacatcaatggcctgggtgttgctgcccgtaacgccaacgacggtatctctctggcgcagaccgctgaaggcgcgctgagcgaagtgaacaacaacctgcagcgtatccgtgacctgaccgttcaggcacagaacagctccaactccgcatctgacatcgactccatccaggctgaagttaaccagcgtatggaagagatcaaccgcgtaaccacccagaccgacttcaacggcatcaaagtgctgaacaccggtaccggttcaagcagctacagcttccaggttggcgcgaaagataacgaaactatctccatcagcctgaccaagtctgactcctacaacctgtacaacgccactggcgccactgcagcgactaccggccagaccatcaacggcaacaaacgttctactgccgctgaaggcttcgacgtactgaaaggtactgttgatgcgtccggtaaaaccgatggcggcccgctggcggatatcgataaggctatcaaagcagttgacgatcagcgcagcctgctgggtgcctcccagaaccgtttcgaatccaccatcactaacctgaacaacaccgtgagcaacctgtcagctgcccgcagccgtattcaggactccgactatgcgaccgaagtgtcgaacatgtcccgcgcgcagatcctgcagcaggccggttcttccgtgctggcacaggccaaccaggttccgcagaccatgctgtccctgctgcgttaa

SEQ ID NO: 173 - DNA, 906 bp, Kosakonia cowanii
  source 1..906: mol_type = genomic DNA
atggctgttattaatactaacaccctgtcgctgatgactcagaacaacctgactaaatctcagtcttctctgggtacatctattgagcgcctgtcttccggcctgcgtattaacagtgctaaagatgatgccgcgggccaggcaattgccaaccgctttacttctaacatcaatggcctgaccgttgctgcccgtaacgccaacgacggtatctcgctggcacagaccgctgaaggcgcgctgagcgaaattaacaacaacctgcagcgtatccgtgacctgaccgttcaggcgcagaacagctccaactccgcgtctgatatcgactccatccaggctgaagttaaccagcgtatggaagaagtgaaccgcgtgaccacccagaccgacttcaacggcatcaaagtgctgaacaccggtaccggttcaagcagctacagcttccaggttggcgcgaaagatagcgaaactatctccatcagcctgaccaagtctgactcctacaacctgtacaatgcgaccggcgcaaccgcagcgactaccggccagaccatcaacggcaacaaacgttctactgccgctgaaggcttcgacgtactgaaaggtactgttgatgcgtccggtaacaccgatggtagcccgctggcagatatcgataaggccatcaaagcggttgacgatcagcgcagcctgctgggtgcctcccagaaccgttttgagtccaccatcactaacctgaacaacaccgtgagcaacctgtcagctgcccgcagccgtattcaggactccgactatgcgaccgaagtgtcgaacatgtcccgcgcgcagatcctgcagcaggccggttcttccgtgctggcgcaggccaaccaggttccgcagactatgctgtccctgctgcgttaa

SEQ ID NO: 174 - DNA, 1254 bp, Kosakonia cowanii
  source 1..1254: mol_type = genomic DNA
atgtcccaggttattaatactaacgcccttagcctcgtcgctcagaacaacctgaacaaatctcaggactctctgggtactgcaattgaacgtctctcttctggtctgcgtattaatagcgcgaaagacgatgcagcaggtcaggcgatctctaaccgtttcaccgccaacatcaacggtctgactcaggcttcccgtaacgccaacgatggtatctccattgcacagaccactgaaggcgcgctgaacgaaatcaacgacaacctgcagaacatccgtcgtctgtccgtacaggctcagaacggcaccaactccgattctgaccgtcagtccatccaggacgaaatcgacgcgcgtctggacgagatcaaccgtatctctgaacagaccgagttcaacggcgtgaaagtactgagcaaagaccagaagctctctatccaggttggttctaacgatggccagactatcgatatcgaactgaaccagatggactcttctactctgggtatggacggcttcagcgtagctaacggcattgacactactactctgactgcaagcaccggtacagtgaaagttgacagtggtttcgactacgatgcagctaaattcaccgacagtggcgcgaccgcagcaaccagcatcgacgatatcgtggttgatgataacggcgacgtgtttgcagtgaaaggcgctgaaatgtacgccgtaaccgaagatccgactactggtgaaatctccttcaactccgataacgacgttgccagctctgttgtgggcacaccgaccagcgttgttggtgaagatatgatgaaagaccaggctattaacatgaccggtatcaccggtacgttaatggaagatggtaaaggtaactactacgttgacgacggtgccggcaacctgactgaagcgactattgataccactacctggactgcaacggataccggtaaagctgtttctactactccggcaacttccgatccgctgaccaaaatcgacgaagcactggcgcaggttgatgaaatgcgttccggtctgggtgcggtacagaaccgtttcgcgtctgttatcagcaacctgaacaacaccgttaacaacctgtctgaatcccgctctcgtattctggatgctgacttcgcgtctgaagtatctgaaatgagccgcgcgaacattctgcagtctgcaggcaccaccgtgctggcacaggctaaccaggttccgcagaacgtgctgtctctgctgggctaa

SEQ ID NO: 175 - DNA, 521 bp, Kosakonia cowanii
  source 1..521: mol_type = genomic DNA
atggctgttattaatactaacaccctgtcgctgatgactcagaacaacctgactaaatctcagtcttctctgggtaccgctattgagcgcctgtcttccggtctgcgtatcaacagtgcgaaagatgatgctgctggtcaggctatcgctaaccgttttacctctaacatcaatggcctgggtgttgctgcccgtaacgccaacgacggtatctctctctcccagaccgctgaaggtgcgctgggcgaaatcaacaacaacctgcagcgtatccgtgacctgaccgttcaggcacagaacagctccaactccgcgtctgacatcgactccatccaggctgaagttaaccagcgtatggaagaagtgaaccgcgtgaccacccagaccgacttcaacggcatcaaagtgctgaacaccggttccggcaccagcacctataacttccaggtcggcgcgaaagacggcgagaagatcggtatcgacatcagctccagcgacagctacaacctggctgcagcggg

SEQ ID NO: 176 - DNA, 909 bp, Kosakonia cowanii
  source 1..909: mol_type = genomic DNA
atggctgttatcaataccaataccctgtctctgatgactcagaacaacctgactaaatctcagtcttctctgggcacctctattgagcgtctctcttccggtctgcgtatcaacagtgcaaaagatgatgcagcgggtcaggcgatcgccaaccgctttacgtccaacatcaacggcctgtccgttgcagcacgtaacgccaacgacggtatctctctctcccagaccgctgaaggcgcgctgggcgaaatcaacaacaacctgcagcgtatccgtgacctgaccgttcaggcacagaatagctccaactccgcgtctgacatcgactccatccaggctgaagttaaccagcgtatggaagaagtgaaccgcgtaaccaaccagaccgacttcaacggcattaaagtgctgaacaccggttccggcaccagcacctataacttccaggttggttcgaaagacggcgagaagatcggtatcgacatcagctccagcgacagctacaacctggctgcagcgggctcttccggtactgcactgaacaccaaagccatggcttccggtgataccgttaacggtacccagcgtcagactcaggctgttggcttcgacgttctgaacggtaaagtaaccggcggcgcgagcggttctgcttctggtactactccgctggcagatatcgatgcggcaatcaagtctgttgactctcagcgcagcctgctgggtgcgtcccagaaccgtttcgaatccaccatcactaacctgaataacaccgtgagcaacctgtcgtctgcccgcagccgtattcaggactccgactatgcgaccgaagtgtcgaacatgtcccgcgcgcagatcctgcagcaggctggttcttccgtgctggcgcaggccaaccaggttccgcag

SEQ ID NO: 177 - DNA, 794 bp, Kosakonia cowanii
  source 1..794: mol_type = genomic DNA
atggctgttatcaataccaataccctgtcgctgatgacccagaacaacctgactaaatctcagtcttctctgggcacctctattgagcgtctctcttccggtctgcgtatcaacagtgcaaaagatgatgctgctggtcaggcgatcgctaaccgttttacgtctaacatcaacggcctgtccgttgcgtcacgtaacgctaacgacggtatttctctctcccagaccgctgaaggcgcgctgggcgaaatcaacaacaacctgcagcgtatccgtgacctgaccgttcaggcacagaacagctctaactccgcgtccgacatcgactccatccaggctgaagttaaccagcgtatggaagaagtgaaccgcgtaaccaaccagaccgacttcaacggcatcaaagtgctgaacaccggttccggcaccagcacctacaacttccaggttggttcgaaagacggcgagaagatcggtatcgacatcagctccagcgacagctacaacctggctgcagcgggctcttccggtactgcactgaacaccaaagccatggcttccggtgataccgttaacggtacccagcgtcagactcaggctgttggcttcgacgttctgaacggtaaagtaaccggcggcgcgagcggttctgcttctggtactactccgctggcagatatcgatgcggcgatcaagtctgttgactctcagcgcagcctgctgggtgcgtcccagaaccgtttcgaatccaccatcactaacctgaataacaccgtgagcaacctgtcgtctgc

SEQ ID NO: 178 - DNA, 579 bp, Kosakonia cowanii
  source 1..579: mol_type = genomic DNA
atggctgttattaatactaacaccctgtcgctgacgacccagaacaacctgactaaatctcagtcttccctgggcactgcgatcgagcgtctctcttccggtctgcgtatcaacagtgcaaaagatgatgctgctggtcaggcgatcgctaaccgttttacctctaacatcaatggcctgggtgttgctgcccgtaacgccaacgacggtatctctctctcccagaccgctgaaggcgcgctgggcgaaatcaacaacaacctgcagcgtatccgtgacctgaccgttcaggcacagaacagctctaactccgcgtctgacatcgactccatccaggctgaagttaaccagcgtatggaagaagtgaaccgcgtaaccaaccagaccgacttcaacggcatcaaagtgctgaacaccggttccggcaccagcacctacaacttccaggtcggcgcgaaagacggcgagaagatcggtatcgacatcagctccagcgacagctacaacctggctgcagcgggttcttccggtactgcactgaacaccaaagccatggcttccggtgacaccgttaacggt

SEQ ID NO: 179 - DNA, 438 bp, Kosakonia cowanii
  source 1..438: mol_type = genomic DNA
atggctgttattaatactaacaccctgtcgctgatgactcagaacaacctgactaaatctcagtcttctctgggtaccgctattgagcgcctgtcttccggtctgcgtatcaacagtgcgaaagatgatgctgctggtcaggctatcgctaaccgttttacctctaacatcaatggcctgggtgttgctgcccgtaacgccaacgacggtatctctctctcccagaccgctgaaggtgcgctgggcgaaatcaacaacaacctgcagcgtatccgtgacctgaccgttcaggcacagaacagctccaactccgcgtctgacatcgactccatccaggctgaagttaaccagcgtatggaagaagtgaaccgcgtgaccacccagaccgacttcaacggcatcaaagtgctgaacaccggttccggtaccagcacctat

SEQ ID NO: 180 - DNA, 320 bp, Kosakonia cowanii
  source 1..320: mol_type = genomic DNA
caggcaattgccaaccgcttcacctccaacatcaacggcctgagcgttgcatcacgtaacgccaacgacggtatctctctggcgcagaccgctgaaggcgcgctgagcgaagtgaacaacaacctgcagcgtattcgtgacctgaccgttcaggcgcagaacagctccaactccgcatctgacatcgactccatccagtctgaagtcaacgagcgcatgaaagaaatcgaccgcgttaccacgcagaccgatttcaacggccagaaaatcctgaacaaccagactgctgccgctaaatcctacaacttccaggttggcgc

SEQ ID NO: 181 - DNA, 488 bp, Kosakonia cowanii
  source 1..488: mol_type = genomic DNA
tgacatcgactccatccagtctgaagtcaacgagcgcatgaaagaaatcgaccgcgttaccacgcagaccgatttcaacggccagaaaatcctgaacaaccagactgctgccgctaaatcctacaacttccaggttggcgcaaaagatggcgaaaccatcagcatctctatggacagcgctgctggctggaacctcgcttctgcaagtggttcaactaccgtatctccggctgctggcgtttaccacaacacccgtgctgctgcttctctggctaccgttgctggtaacgcccgtagcgttgctgcagttggtttcgacgttgtctccggtaaaatctctggtgccgctgccggtactggctctccgctgaaagatatcgacgccgctatcaaagctgttgatactcagcgtagctccctgggtgcttcccagaaccgtttcgaatctaccatcactaacctgagcaacacggtaagcaacctgtccg

SEQ ID NO: 182 - DNA, 494 bp, Kosakonia cowanii
  source 1..494: mol_type = genomic DNA
tgacatcgactccatccagtctgaagtcaacgagcgcatgaaagaaatcgaccgcgttaccacgcagaccgatttcaacggccagaaaatcctgaacaaccagactgctgccgctaaatcctacaacttccaggttggcgcgaaagatggcgaaaccatcagcatttccatgaacggtgctgctggctggaacctggcttctgcgaaaactgacggcaccacgagtactccgactgctggtggcacctatgcaaacacccgtgctgctgcttctctggctaccgttgctggcaacgcccgtagtgttgctgcagttggtttcgacgttgtctccggtaaaatctctggtgcctctgccggtactggctctccgctgaaagatatcgacgccgctatcaaagctgttgatactcagcgtagctccctgggtgcttcccagaaccgtttcgaatctaccatcactaacctgagcaacacggtaagcaacctgtccg

SEQ ID NO: 183 - DNA, 279 bp, Kosakonia cowanii
  source 1..279: mol_type = genomic DNA
atggctgttattaatactaacaccctctcgctgatgactcagaacaacctgactaaatcacagtcttctctgggcacctctattgagcgtctgtcttccggcctgcgtatcaacagcgcgaaagatgacgcagcgggtcaggcaattgccaaccgcttcacctccaacatcaacggcctgagcgttgcatcacgtaacgccaacgacggtatctctctggcgcagaccgctgaaggcgcgctgagcgaagtgaacaacaacctgcagcgtattcgtgac

SEQ ID NO: 184 - DNA, 279 bp, Kosakonia cowanii
  source 1..279: mol_type = genomic DNA
atggctgttattaatactaacacactgtcgctgatgacccagaacaacctgactaaatcacagtcttctctgggcacctctattgagcgtctctcttccggtctgcgtatcaacagtgcaaaagatgatgctgctggccaggcaattgccaaccgcttcacctccaacatcaacggcctgagcgttgcatcacgtaacgccaacgacggtatctctctggcgcagaccgctgaaggcgcgctgagcgaagtgaacaacaacctgcagcgtattcgtgac

SEQ ID NO: 185 - DNA, 309 bp, Kosakonia cowanii
  source 1..309: mol_type = genomic DNA
atggaagaagtgaaccgcgtaaccaaccagaccgacttcaacggcatcaaagtgctgaacaccggttccggcaccagcacctacaacttccaggtcggcgcgaaagacggcgagaagatcggtatcgacatcagctccagcgacagctacaacctggctgcagcgggctcttccggtactgcactgaacaccaaagccatggcttccggtgacaccgttaacggtacccagcgccagactcaggctgttggcttcgacgttctgaaaggtaaagtgaccggcggcgcgagcggtactgcttccggctcc

SEQ ID NO: 186 - DNA, 354 bp, Kosakonia cowanii
  source 1..354: mol_type = genomic DNA
atggctgttattaatactaacaccctgtcgctgatgactcagaacaacctgactaaatctcagtcttctctgggtaccgctattgagcgcctgtcttccggtctgcgtatcaacagtgcgaaagatgatgctgctggtcaggctatcgctaaccgttttacctctaacatcaatggcctgggtgttgctgcccgtaacgccaacgacggtatttctctctcccagaccgctgaaggcgcgctgggcgaaatcaacaacaacctgcagcgtatccgtgacctgaccgttcaggcacagaacagctccaactccgcgtctgacatcgactccatccaggctgaagttaaccagcgt

SEQ ID NO: 187 - DNA, 333 bp, Kosakonia cowanii
  source 1..333: mol_type = genomic DNA
atggctgttatcaataccaataccctgtctctgatgactcagaacaacctgactaaatctcagtcttctctgggcacctctattgagcgtctctcttccggtctgcgtatcaacagtgcaaaagatgatgcagcgggtcaggcgatcgccaaccgctttacgtccaacatcaacggcctgtccgttgcagcacgtaacgccaacgacggtatctctctctcccagaccgctgaaggcgcgctgggcgaaatcaacaacaacctgcagcgtatccgtgacctgaccgttcaggcacagaacagctccaactccgcgtctgacatcgactccatc

SEQ ID NO: 188 - DNA, 357 bp, Kosakonia cowanii
  source 1..357: mol_type = genomic DNA
atggcttccggtgataccgttaacggtacccagcgtcagactcaggctgttggcttcgacgttctgaacggtaaagtaaccggcggcgcgagcggttctgcttctggtactactccgctggcagatatcgatgcggcgatcaaatctgttgactctcagcgcagcctgctgggtgcgtcccagaaccgtttcgaatccaccatcactaacctgaataacaccgtgagcaacctgtcgtctgcccgcagccgtattcaggactccgactatgcgaccgaagtgtcgaacatgtcccgcgcgcagatcctgcagcaggctggttcttccgtgctggcgcaggccaaccaggttccgcag

SEQ ID NO: 189 - DNA, 440 bp, Kosakonia cowanii
  source 1..440: mol_type = genomic DNA
atggaagaagtgaaccgcgtaaccaaccagaccgacttcaacggcatcaaagtgctgaacaccggttccggcaccagcacctacaacttccaggttggttcgaaagacggcgagaagatcggtatcgacatcagctccagcgacagctacaacctggctgcggcgggctcttccggtactgcactgaacaccaaagccatggcttccggtgataccgttaacggtacccagcgtcagactcaggctgttggcttcgacgttctgaacggtaaagtaaccggcggcgcgagcggttctgcttctggtactactccgctggcagatatcgatgcggcgatcaaatctgttgactctcagcgcagcctgctgggtgcgtcccagaaccgtttcgaatccaccatcactaacctgaataacaccgtgagcaacctgtcgtctgc

SEQ ID NO: 190 - DNA, 308 bp, Kosakonia cowanii
  source 1..308: mol_type = genomic DNA
atggctgttattaatactaacaccctgtcgctgacgacccagaacaacctgactaaatctcagtcttccctgggcactgcgatcgagcgtctctcttccggtctgcgtatcaacagtgcaaaagatgatgctgctggtcaggcgatcgctaaccgttttacctctaacatcaatggcctgggtgttgctgcccgtaacgccaacgacggtatctctctctcccagaccgctgaaggcgcgctgggcgaaatcaacaacaacctgcagcgtatccgtgacctgaccgttcaggcacagaacagctccaa

SEQ ID NO: 191 - DNA, 451 bp, Kosakonia cowanii
  source 1..451: mol_type = genomic DNA
atgaaagaaatcgaccgcgttaccacgcagaccgatttcaacggccagaaaatcctgaacaaccagactgctgccgctaaatcctacaacttccaggttggcgcaaaagatggcgaaaccatcagcatctctatggacagcgctgctggctggaacctcgcttctgcaagtggttcaactaccgtatctccggctgctggcgtttaccacaacacccgtgctgctgcttctctggctaccgttgctggtaacgcccgtagcgttgctgcagttggtttcgacgttgtctccggtaaaatctctggtgccgctgccggtactggctctccgctgaaagatatcgacgccgctatcaaagctgttgatactcagcgtagctccctgggtgcttcccagaaccgtttcgaatctaccatcactaacctgagcaacacggtaagcaacctgtccg

SEQ ID NO: 192 - DNA, 201 bp, Kosakonia cowanii
  source 1..201: mol_type = genomic DNA
atggcgaaaccatcagcatctctatggacagcgctgctggctggaacctcgcttctgcaagtggttcaactaccgtatctccggctgctggcgtttaccacaacacccgtgctgctgcttctctggctaccgttgctggtaacgcccgtagcgttgctgcagttggtttcgacgttgtctccggtaaaatctctggtgccg

SEQ ID NO: 193 - DNA, 457 bp, Kosakonia cowanii
  source 1..457: mol_type = genomic DNA
atgaaagaaatcgaccgcgttaccacgcagaccgatttcaacggccagaaaatcctgaacaaccagactgctgccgctaaatcctacaacttccaggttggcgcgaaagatggcgaaaccatcagcatttccatgaacggtgctgctggctggaacctggcttctgcgaaaactgacggcaccacgagtactccgactgctggtggcacctatgcaaacacccgtgctgctgcttctctggctaccgttgctggcaacgcccgtagtgttgctgcagttggtttcgacgttgtctccggtaaaatctctggtgcctctgccggtactggctctccgctgaaagatatcgacgccgctatcaaagctgttgatactcagcgtagctccctgggtgcttcccagaaccgtttcgaatctaccatcactaacctgagcaacacggtaagcaacctgtccg

SEQ ID NO: 194 - DNA, 179 bp, Kosakonia cowanii
  source 1..179: mol_type = genomic DNA
caggcaattgccaaccgcttcacctccaacatcaacggcctgagcgttgcatcacgtaacgccaacgacggtatctctctggcgcagaccgctgaaggcgcgctgagcgaagtgaacaacaacctgcagcgtattcgtgacctgaccgttcaggcgcagaacagctccaactccgcatc

SEQ ID NO: 195 - DNA, 400 bp, Kosakonia cowanii
  source 1..400: mol_type = genomic DNA
cgatttcaacggccagaaaatcctgaacaaccagactgctgccgctaaatcctgcaacttccaggttggcgcgaaagatggcgaaaccatcagcatttccatgaacggtgctgctggcttgaacctggcttctgcgaaaactgacggcaccacgagtactccgactgctggtggcacctatgcaaacacccgtgctgctgcttctctggctaccgttgctggcaacgcccgtagtgttgctgcagttggtttcgacgttatctccggtaaaatctctggtgcctctgccggtactggctctccgctgaaagatatcgacgccgctatcaaagctgttgatactcagcgtagctccctgggtgcttcccagaaccgtttcgaatctaccatcactaacctg

SEQ ID NO: 196 - DNA, 810 bp, Kosakonia cowanii
  source 1..810: mol_type = genomic DNA
atgcaggtaattaatactaataccctcagcttaattgcacagaacaacctgaataaatctcaggcgaccctcggcaccgccattgagcgtctctcttccggtcgccgcatcaacagtgcaaaagatgatgccgccggccaggcgatcagtaaccgcttcagcgcgaaaatcaacggcctgacccaggcagcccgtaacgctaacgacggcacctcgattgcgcagaccacggaaggcgcactgaacgaagtgaacgacaacctgcagaaaatccgtaccctgaccgttcaggccaaaaacggcacgaacacggattcagataaacagtctatccaggacgaaatcaaacagcgtctggctgagattgaccgtatttccgaacagactgagttcaacggcatcaaagtcctgagtaaagatcagtctctgagcattcaggtgggtgcggatgacaaacagactatcgacattgagctcaaaaaaatggactcagccgagctgaaaatggacgattacgacgtcaccggcgcggatacggatacgctgctggccaccgttgacgccgcgctgagcaccgtcagctcgctgcgttccggtctgggtgcggtgcagaaccggtttgattccgtggtgaataccctgaacagcaccgtggttaacctgaccgcatcccagtcacgtatccaggatgcggacatggcgacggaggtgtcgaatatgtccaaaggcaatatgctgcagcaggccggtaccgccgtgctggcacaggctaaccagtcaccacagaacattctgtcactgctgcgttaa

SEQ ID NO: 197 - DNA, 306 bp, Kosakonia cowanii
  source 1..306: mol_type = genomic DNA
atggctgttattaatactaacaccctgtcgctgacgacccagaacaacctgactaaatcacagtcttctctgggcaccgctattgagcgtctctcttccggtctgcgtattaacagtgcaaaagatgatgctgctggtcaggcaattgctaaccgtttcacctccaacatcaatggcctgggtgttgcagcgcgtaacgccaacgacggtatctcgctggcacagaccgctgaaggcgcgctgggcgaaatcaacaacaacttacagcgtatccgtgacctgaccgttcaggcacagaacagctct

SEQ ID NO: 198 - DNA, 906 bp, Kosakonia cowanii
  source 1..906: mol_type = genomic DNA
atggctgttattaatactaacaccctgtcgctgatgacccagaacaacctgactaaatctcagtcttctctgggcaccgctattgagcgcctgtcttccggcctgcgtattaacagtgcgaaagatgatgccgcgggccaggctatcgccaaccgctttacttccaacatcaatggcctgtccgtcgcagcgcgtaacgccaacgacggtatctcgctggcacagaccgctgaaggcgcgctgggcgaaatcaacaacaacttacagcgtatccgtgacctgaccgttcaggcacagaacagctccaactccgcgtccgacgtcgactccatccaggctgaagttaaccagcgtatggaagagatcaaccgcgtgaccacccagaccgacttcaacggcatcaaagtgctgaacaccggtaccggcagcagcagctacagcttccaggttggcgcgaaagataacgaaactatctctatcagcctgagttcctctaacgcctacaacctgtacaacgccaccggtgccactgcacagactaccggccagaccatcaacggcaacgcccgtaccaccgcagccgaaggcttcgatgtgcttcagggtaccgtaagcagcggcggcgctaccaacggctctccgctggcggatatcgatgcggcgatcaaatcggttgactcccagcgcagcctgctgggtgcgtcccagaaccgttttgaatccaccatcaccaacctgaacaacaccgtgagcaacctgtcgtctgcccgcagccgtattcaggactctgattatgcgaccgaagtgtcgaacatgtcccgcgcgcagatcctgcagcaggccggttcttccgtgctggcccaggccaaccaggttccgcagaccatgctctccctgctgcgttaa

SEQ ID NO: 199 - DNA, 1257 bp, Kosakonia cowanii
  source 1..1257: mol_type = genomic DNA
atgtcccaggttattaatactaacgcccttagcctcgtcgctcagaacaacctgaataaatctcagggctctctgggtactgcaattcagcgtctctcttctggtctgcgtattaacagcgcgaaagacgatgcagcaggtcaggcgatctctaaccgtttcaccgccaacatcaacggcctgagccaggcttcccgtaacgccaacgatggtatctccattgcacagaccactgaaggcgcgctgaacgaaatcaacgacaacctgcagaacatccgtcgtctgtccgtacaggcgcagaacggcaccaactccgattctgaccgtcagtccatccaggacgaaatcgacgcgcgtctggacgagatcaaccgtatctctgaacagactgagttcaacggcgtgaaagtgctgagcaaagatcagagcctctctattcaggtaggttctaacgatggccagactatcgatatcgaactgagcaaaatggattccagcaccctgagcatggatggtttcagcgtagctaacggcatcgacccaaataccctgactgcaagcactggtacagtgaaagttgacagtggtttcgactacgatgcgactaaattcaacgactccactaccggtactgcggtaaccagcatcgacgatatcgtggttgatgataacggcgacgtctttgcagtgaaaggcgctgaaatgtacgccgtaaccgaagatccgactactggtgagatctccttcgactccggtactgacgttgccagcactgttgtaggcaccccgaccagcgttgtgggtgaagatatgatgaaagaccaggctattaacatgaccggtatcaccggtacgttaatggaagatggtaaaggtaactactacgttgacgacggtgccggcaacctgactgaagcaactattgataccactacctgggctgcaacggataccggtaaagctgtttctactactccggcaacttccgatccgctgaccaaaatcgacgaagcgctggcgcaggttgatgaaatgcgttccggtctgggtgcggtacagaaccgtttcgcgtctgttatcagcaacctgaacaacaccgttaacaacctgtctgaatcccgctctcgtattctggatgctgacttcgcgtctgaagtatctgaaatgagccgcgcgaacattctgcagtctgcaggcaccaccgtgctggcacaggctaaccaggttccgcagaacgttctgtctctgctgcgttaa

SEQ ID NO: 200 - DNA, 609 bp, Kosakonia cowanii
  source 1..609: mol_type = genomic DNA
aacagctctaactccgcgtccgacatcgactccatccaggctgaagttaaccagcgtatggaagaagtgaaccgcgtgaccacccagaccgacttcaacggcatcaaagtgctgaacaccggtaccggcagcagcagctacgatttccaggtgggttctaaagacaacgaaaagatctccatcagcctgagctcttccaactcttacaacctgtacaacgccaccggcgccactgcacagactaccggccagaccatcaacggcaacgcccgtgctactgcagctgaaggcttcgatgtgcttcagggtaccgtaagcagcggcggcaccaccgacggctctccgctggcggatatcgatgcggcgatcaaatcggttgactcccagcgcagcctgttgggtgcgtcccagaaccgttttgaatccaccatcaccaacctgaacaacaccgtgagcaacctgtcatctgcccgcagccgtattcaggactccgactacgcgaccgaagtgtcgaacatgtcccgcgcgcagatcctgcagcaggccggttcttccgtgctggcccaggccaaccaggttccgcagaccatgctgtccctgctgcgttaa

SEQ ID NO: 201 - DNA, 909 bp, Kosakonia cowanii
  source 1..909: mol_type = genomic DNA
atggccgtcatcaataccaatacgctgtcactcatcaaccaaaataaccttaataaatcccaggcggcgcaaagctctgcaattcagcgtttatcctccggcctgcgtattaacagcgcgaaagatgacgctgcgggccaggcgattgccaaccgtttctcctccagcattaacggcatgggcgtggccgcaagaaatgccaacgatgctatttcgctggcacaaacggctgaaggcgcattaagcgaaataaataacaacttgcagcgtatccgcgatctggccgtgcaggcgcaaaatagcactaactctgcctccgatgtcgactctattcagtcggaagtgaatgaacgtatggccgagattaaccgcgtgacccgccagacagactttaacggcatcaaaattctcgatagcggctctggttcgtttggttacggcttccaggtgggtgctgatgatggcgaagagattgttctcacgataggtagcagcgatgactataacctgggggcaaattccggttcgattggcgaagtctctggcgaatttattcacggtagcgcgcgtagcgtaaaagcaatgggctttgatgtgctccatggcaccgtcaccccctatagcggtgcgatactcaataatccgcttgccgccattgacgatgcgataaaagccgtcgatacccaacgcagttcgctcggggcatttcagaaccgctttgaatcgacgataaacaacctcaaccaggcggcgaccagtctctccgctgcgcgcagccgaataaatgacgccgactatggtacggaggtctcaaatatgagcagggcgcaaatattacaacaggccggctcgtccgtgctggcgcaggccaaccaggtgccgcagaccatgctgtcgctgctgcgttaa

SEQ ID NO: 202 - DNA, 609 bp, Kosakonia cowanii
  source 1..609: mol_type = genomic DNA
aacagctctaactccgcgtccgacatcgactccatccaggctgaagttaaccagcgtatggaagaagtgaaccgcgtgaccacccagaccgacttcaacggcatcaaagtgctgaacaccggtaccggcagcagcagctacagcttccaggttggcgcgaaagataacgaaactatctctatcagcctgagctcttccaactcttacaacctgtacaacgccaccggcgccactgcacagactaccggccagaccatcaacggtaatgcccgtagcaccgcagctgaaggcttcgatgtgcttaagggtaccgtaagcagcggcggcgctaccgacggctctccgctggcagatatcgatgcggcgatcaaatcggttgactcccagcgcagcctgctgggtgcgtcccagaaccgttttgaatccaccatcaccaacctgaacaacaccgtgagcaacctgtcgtctgcccgcagccgtattcaggactccgattatgcgaccgaagtgtcgaacatgtcccgcgcgcagatcctgcagcaggccggttcttccgtgctggcccaggccaaccaggttccgcagaccatgctgtccctgctgcgttaa

SEQ ID NO: 203 - DNA, 306 bp, Kosakonia cowanii
  source 1..306: mol_type = genomic DNA
atggctgtcattaatactaacaccctgtcgctcacgacccagaacaacctgactaaatcacagtcttctctgggcaccgctattgagcgtctctcttccggtctgcgtatcaacagtgcaaaagatgatgctgctggtcaggcaattgctaaccgtttcacctctaacatcaatggcctgggtgttgcagcgcgtaacgccaacgacggtatctcgctggcacagaccgctgaaggcgcgctgggcgaaatcaacaacaacttacagcgtatccgtgacctgaccgttcaggcacagaacagctct

SEQ ID NO: 204 - DNA, 357 bp, Kosakonia cowanii
  source 1..357: mol_type = genomic DNA
atggctgttatcaatactaacaccctgtcgctcacgactcagaacaacctgactaaatctcagtcttctctgggtaccgctattgagcgtctctcttccggtctgcgtatcaacagtgcaaaagatgatgctgctggtcaggcgatcgcaaaccgtttcacctctaacatcaatggtctgggtgttgcagcgcgtaacgccaacgacggtatctccctggcacagaccgctgaaggcgcgctgggcgaaatcaacaacaacttacagcgtatccgtgacctgaccgttcaggcacagaacagctctaactccgcgtccgacatcgactccatccaggctgaagttaaccagcgtatg

SEQ ID NO: 205 - DNA, 924 bp, Kosakonia cowanii
  source 1..924: mol_type = genomic DNA
atgcgtcttagcacaagttatatttttcaaaaccgcatagacagcctgggcgacgcgatgacgggttacaacgacctggcgacccgcctctctgctggtcagacgctgctgaagccctctgacgatccgaccggcgcgtcgcagtctgtcaccttacaaacggcgctgtcgcgcatgagccagttcgacaccgcgcgcacctacgcgcaggatgcattaggccaggaagataacactctggactctatcggcaacttgctgacagagaacctgacgcagaaagtgattgccggtggtaacggtgcctactctgacgaagatcgcgctgcgctggcggaagagttacagggcatccgcgataacctgctggatctggcgaacactaaaaacagcgacggtcgctatatttttgccgggtataaaaccggcagtgcgccgttccaggccgatggcacctatgtcggcggcgataccgctatgacccaggtggtctctgacagcactgaaatgcaggttggccataccggtgatgatgtctttctgagcggtacgccggacgatctgtttaaagccctcgacaacgcaattgcgcagctgaaacagccgatcaccagcgatgcggacagggatgcgctacaggctgtgctggatgattccaatgtcagcattaagaaaaatatcgataacctcggcaaggttcgcgccaccgtcggtaccaatatgcagcagattgaatcactgggattcagcgctgaggcacaaagcatcaatgtgcagagccgcctgcaggaaaccttaggttcggactgggactcgatgatcaccctgttatctcagtcaaagatgtcggaattcgcccttaattcctccatgacggtatttcagtcgatgcagcagctctctattttcaaagtaatgggttga

SEQ ID NO: 206 - DNA, 247 bp, Kosakonia cowanii
  source 1..247: mol_type = genomic DNA
ggccatcaaagcggttgacgatcagcgcagcctgctgggtgcctcccagaaccgtttcgagtccaccatcactaacctgaacaacaccgtgagcaacctgtcagcggcccgcagccgtattcaggactccgactatgcgacggaagtatcgaacatgtcccgcgcgcagatcctgcagcaggctggttcttccgtgctggcacaggccaaccaggttccgcagaccatgctctccctgctgcgttaa

SEQ ID NO: 207 - DNA, 161 bp, Kosakonia cowanii
  source 1..161: mol_type = genomic DNA
ccgtgagcaacctgtcagcggcccgcagccgtattcaggactccgactatgcgaccgaagtgtcgaacatgtcccgcgcgcagatcctgcagcaggccggttcttccgtgctggcacaggccaaccaggttccgcagaccttgctgtccctgctgcgttaa

SEQ ID NO: 208 - DNA, 264 bp, Kosakonia cowanii
  source 1..264: mol_type = genomic DNA
gactaccggccagaccatcaacggcaacaaacgttctactgccgctgaaggcttcgacgtactgaaaggtactgttgatgcgtccggtaacaccgatggcagcccgctggctgatatcgataaggccatcaaagcggttgacgatcagcgcagcctgctgggtgcctcccagaaccgtttcgagtccaccatcactaacctgaacaacaccgtgagcaacctgtcagcggcccgcagccgtattcaggactccgactatgcgac

SEQ ID NO: 209 - DNA, 1254 bp, Kosakonia cowanii
  source 1..1254: mol_type = genomic DNA
atgtcccaggttattaatactaacgcccttagcctcgtcgctcagaacaacctgaacaaatctcaggactctctgggtactgcaattgaacgtctctcttctggtctgcgtattaatagcgcgaaagacgatgcagcaggtcaggcgatctctaaccgtttcaccgccaacatcaacggtctgactcaggcttcccgtaacgccaacgatggtatctccatcgcgcagaccactgaaggcgcgctgaacgaaatcaacgacaacctgcagaacatccgtcgtctgtccgtacaggcgcagaacggcaccaactccgattctgaccgtcagtccatccaggacgaaatcgatgcgcgtctggacgagatcaaccgtatctctgaacagaccgagttcaacggcgtgaaagtactgagcaaagaccagaagctctctatccaggttggttctaacgatggccagactatcgatatcgaactgaaccagatggactcttctactctgggtatggacggcttcagcgtagctaacggcattgacactactactctgactgcaagcaccggtacagtgaaagttgacagtggtttcgactacgatgcagctaaattcaccgacagtggcgcgaccgcagcaaccagcatcgacgatatcgtggttgatgataacggcgacgtgtttgcagtgaaaggcgctgaaatgtacgccgtaaccgaagatccgactactggtgaaatctccttcaactccgataacgacgttgccagctctgttgtgggcacaccaaccagcgttgttggtgaagatatgatgaaagaccaggctattaacatgaccggtatcaccggtacgttaatggaagatggtaaaggtaactactacgttgacgacggtgccggcaacctgactgaagcgactattgataccactacctggactgcaacggataccggtaaagctgtttctactactccggcaacttccgatccgctgaccaaaatcgacgaagcgctggcgcaggttgatgaaatgcgttccggtctgggtgcggtacagaaccgtttcgcgtctgttatcagcaacctgaacaacaccgttaacaacctgtctgaatcccgctctcgtattctggatgctgacttcgcatctgaagtatctgaaatgagccgcgcgaacattctgcagtctgcaggcaccaccgtgctggcacaggctaaccaggttccgcagaacgtgctgtctctgctgggctaa

SEQ ID NO: 210 - DNA, 924 bp, Kosakonia cowanii
  source 1..924: mol_type = genomic DNA
atgcgtcttagcacaagttatatttttcaaaaccgcatagacagcctgggcgacgcgatgacgggttacaacgacctggcgacccgcctctctgctggccagacgctgctgaagccctctgacgatccaaccggcgcgtcgcagtctgttactttacaaacggcgctgtcgcgcatgagccagttcgacaccgcacgcacctacgcgcaggatgcgctgggccaggaagataacaccctggactctatcggcaacttgctgacagagaacctgacgcagaaagtgattgccggtggtaacggtgcttactctgacgaagatcgcgccgcgctggcggaagagttacagggcatccgcgataacctgctggatctggcgaacaccaaaaacagcgacggtcgctacatttttgccggctataaaaccggcagcgcgccgttccaggccgatggcacctatgtcggtggcgataccgccatgacgcaggtggtctctgacagcaccgaaatgcaggtcggtcataccggctcagaggtgtttatgagcggcaccccggacgatctgtttgaagccctcgacaacgcgattgcgcagttgaaacagccggtcaccagcgatgctgacagggacgcgctgcaggctgtgctggatgactccaatgtcagcatcaagaagaatattgataacctcggcaaggtgcgcgccaccgtcggtaccaatatgcagcagattgaatcgttgggattcagcgctgaggctcaaagcatcaatgtgcagagccgcctgcaggaaactttaggttcggactgggactcgatgattaccctgttatcccagtcaaagatgtcggaattcgcgcttaattcttccatgacggtatttcagtcgatgcagcagctctctattttcaaagtaatgggttga

SEQ ID NO: 211 - DNA, 906 bp, Kosakonia cowanii
  source 1..906: mol_type = genomic DNA
atggctgttattaatactaacaccctgtcgctgatgacccagaacaacctgactaaatctcagtcttctctgggcaccgctattgagcgcctgtcttccggcctgcgtattaacagtgcgaaagatgatgccgcgggccaggctatcgccaaccgctttacttccaacatcaatggcctgtccgtcgcagcgcgtaacgccaacgacggtatctcgctggcacagaccgctgaaggcgcgctgggcgaaatcaacaacaacctgcagcgtatccgtgacctgaccgttcaggcacagaacagctccaactccgcgtccgacgtcgactccatccaggctgaagttaaccagcgtatggaagagatcaaccgcgtgaccacccagactgacttcaacggcatcaaagtgctgaacaccggtaccggcaccagcagctacagcttccaggttggcgcgaaagataacgaaactatctctatcagcctgagctcctctaacgcttacaacctgtacaacgccaccggcgccactgcacagactaccggccagaccatcaacggcaacgcccgtaccaccgcagccgaaggcttcgatgtgcttcagggtaccgtaagcagcggcggcgctaccaacggctctccgctggcggatatcgatgcggcgatcaaatcggttgactcccagcgcagcctgctgggtgcgtcccagaaccgttttgaatccaccatcaccaacctgaacaacaccgtgagcaacctgtcgtctgcccgcagccgtattcaggactccgactatgcgaccgaagtgtcgaacatgtcccgcgcgcagatcctgcagcaggccggttcttccgtgctggcccaggccaaccaggttccgcagaccatgctctccctgctgcgttaa

SEQ ID NO: 212 - DNA, 410 bp, Kosakonia cowanii
  source 1..410: mol_type = genomic DNA
atggctgttattaatactaacaccctgtcgctgacgacccagaacaacctgactaaatcacagtcttctctgggtaccgctattgagcgtctctcttccggtctgcgtattaacagtgcaaaagatgatgctgctggtcaggcaattgctaaccgtttcacctccaacatcaatggcctgggtgttgcagcgcgtaacgccaacgacggtatctcgctggcacagaccgctgaaggcgcgctgggcgaaatcaacaacaacctgcagcgtatccgtgacctgaccgttcagtcacagaacagctccaactccgcgtccgacatcgactccatccaggctgaagttaacaagcgtatggaagaagtgaaccgcgtgaccacccagaccgacttcaacggcataaagtgctg

SEQ ID NO: 213 - DNA, 552 bp, Kosakonia cowanii
  source 1..552: mol_type = genomic DNA
atggaagaagtgaaccgcgtgaccacccagaccgacttcaacggcattaaagtgctgaacaccggtaccggcagcagcagctacagcttccaggttggcgcgaaagataacgaaactatctctatcagcctgagctcttccaactcttacaacctgtacaacgccaccggcgccactgcacagactaccggccagaccatcaatggtaatgcccgtagcaccgcagctgaaggcttcgatgtgcttaagggtaccgtaagcagcggcggcgctaccgacggctctccgctggcagatatcgatgcggcgatcaaatcggttgactcccagcgcagcctgctgggtgcgtcccagaaccgttttgaatccactatcaccaacctgaacaacaccgtgagcaacctgtcatctgcccgcagccgtattcaggactccgactatgcgaccgaagtgtcgaacatgtcccgcgcgcagatcctgcagcaggccggttcttccgtgctggcccaggccaaccaggttccgcagaccatgctgtccctgctgcgttaa

SEQ ID NO: 214 - DNA, 906 bp, Kosakonia cowanii
  source 1..906: mol_type = genomic DNA
atggctgttatcaatactaacaccctgtcgctcacgactcagaacaacctgactaaatcacagtcttctctgggtaccgctattgagcgtctctcttccggtctgcgtatcaacagtgcaaaagatgatgctgctggtcaggcgatcgcaaaccgtttcacctctaacatcaatggtctgggtgttgcagcacgtaacgccaacgacggtatctcgctggcacagaccgctgaaggcgcgctgggcgaaatcaacaacaacttacagcgtatccgtgacctgaccgttcaggcacagaacagctccaactccgcgtccgacatcgactccatccaggctgaagttaaccagcgtatggaagaagtgaaccgcgtgaccacccagaccgacttcaacggcatcaaagtgctgaacaccggtaccggcagcagcagctacgatttccaggtgggttctaaagacaacgaaaagatctccatcagcctgagctcttccaactcttacaacctgtacaacgccaccggcgccactgcacagactaccggccagaccatcaacggcaacgcccgtgctactgcagctgaaggcttcgatgtgcttcagggtaccgtaagcagcggcggcaccaccgacggctctccgctggcggatatcgatgcggcgatcaaatcggttgactcccagcgcagcctgctgggtgcgtcccagaaccgttttgaatccaccatcaccaacctgaacaacaccgtgagcaacctgtcatctgcccgcagccgtattcaggactccgactacgcgaccgaagtgtcgaacatgtcccgcgcgcagatcctgcagcaggccggttcttccgtactggcccaggccaaccaggttccgcagaccatgctgtccctgctgcgttaa

SEQ ID NO: 215 - DNA, 909 bp, Kosakonia cowanii
  source 1..909: mol_type = genomic DNA
atggccgtcatcaataccaatacgctgtcactcatcaaccaaaataaccttaataaatcccaggcggcgcaaagctctgcaattcagcgtttatcctccggcctgcgtattaacagcgcgaaagatgacgctgcgggccaggcgattgccaaccgtttctcctccagcattagcggcatgggcgtggctgcaagaaatgccaacgatgctatttcgctggcacaaacggctgaaggcgcattaagcgaaataaataacaacttgcagcgtatccgcgatctggccgtgcaggcgcaaaatagtactaactctgcctccgacgttgactctattcagtcggaagtgaatgaacgtatggccgagattaatcgcgtaacccgccagacggactttaacggcatcaaaattctcgatagcggctcgggttcgtttggttacggcttccaggtgggtgctgatgatggcgaagagattgttctcacgataggtagcagcgatgactataacctgggggcaaattccggttcgattggcgaagtctctggcgaatctattcacggtagcgcgcgtagcgtaaaagcaatgggctttgatgtgctccatggcaccgtcaccccctatagcggtgcgatactcaataatccgcttgccgccattgacgatgcgataaaagccgtcgatacccaacgcagttcgctcggggcatttcagaaccgctttgaatcgacgataaataacctcaatcaggcggcgaacagtctctccgctgcgcgcagccgaataaatgacgccgactatggtacggaggtctcaaatatgagcagggcgcaaatattacaacaggccggctcgtccgtgctggcgcaggccaaccaggtgccgcagaccatgctgtcgctgctgcgttaa

SEQ ID NO: 216 - DNA, 315 bp, Kosakonia cowanii
  source 1..315: mol_type = genomic DNA
cgaaatcaacaacaacctgcagcgtatccgtgacctgaccgttcaggcacagaacagctccaactccgcgtccgacatcgactccatccaggctgaagttaaccagcgtatggaagaagtgaaccgcgtgaccacccagactgacttcaacggcatcaaagtgctgaacaccggtaccggcagcagcagctacgacttccaggtgggttctaaagacaacgaaaagatctccatcagcctgagctcttccaactcttacaacctgtacaacgccaccggcgccactgcacagactaccggccagaccatcaacgg

SEQ ID NO: 217 - DNA, 1254 bp, Kosakonia cowanii
  source 1..1254: mol_type = genomic DNA
atgtcccaggttattaatactaacgcccttagcctcgtcgctcagaacaacctgaacaaatctcaggactctctgggtactgcaattgaacgtctctcttctggtctgcgtattaatagcgcgaaagacgatgcagcaggtcaggcgatctctaaccgtttcaccgccaacatcaacggtctgactcaggcttcccgtaacgccaacgatggtatctccatcgcgcagaccactgaaggcgcgctgaacgaaatcaacgacaacctgcagaacatccgtcgtctgtccgtacaggcacagaacggcaccaactccgattctgaccgtcagtccatccaggacgaaatcgacgcgcgtctggacgagatcaaccgtatctctgaacagaccgagttcaacggcgtgaaagtactgagcaaagaccagaagctctctatccaggttggttctaacgatggccagactatcgatatcgaactgaaccagatggactcttctactctgggtatggacggcttcagcgtagctaacggcattgacactactactctgactgcaagcaccggtacagtgaaagttgacagtggtttcgactacgatgcagctaaattcaccgacagtggcgcgaccgcagcaaccagcatcgacgatatcgtggttgatgataacggcgacgtgtttgcagtgaaaggcgctgaaatgtacgccgtaaccgaagatccgactactggtgaaatctccttcaactccgataacgacgttgccagctctgttgtgggcactccgaccagcgttgttggtgaagatatgatgaaagaccaggctattaacatgaccggtatcaccggtacgttaatggaagatggtaaaggtaactactacgttgacgacggtgccggcaacctgactgaagcgactattgataccactacctggactgcaacggataccggtaaagctgtttctactactccggcaacttccgatccgctgaccaaaatcgacgaagcgctggcgcaggttgatgaaatgcgttccggtctgggtgcagtacagaaccgtttcgcgtctgttatcagcaacctgaacaacaccgttaacaacctgtctgaatctcgctctcgtattctggatgctgacttcgcgtctgaagtatctgaaatgagccgcgcgaacattctgcagtctgcaggcaccaccgtgctggcacaggctaaccaggttccgcagaacgtgctgtctctgctgggctaa

SEQ ID NO: 218 - DNA, 585 bp, Kosakonia cowanii
  source 1..585: mol_type = genomic DNA
atcgactccatccaggctgaagttaaccagcgtatggaagagatcaaccgcgtgaccacccagaccgacttcaacggcatcaaagtgctgaacaccggtaccggttcaagcagctacagcttccaggttggcgcgaaagataacgaaactatctccatcagcctgaccaagtctgactcctacaacctgtacaacgccactggcgccactgcagcgactaccggccagaccatcaacggcaacaaacgtgccaccgctgctgaaggcttcgacgtactgaaaggtaccgttgatgcgtccggtaaaaccaacggtgctccgctggcagatatcgatgcggccatcaaagcggttgacgatcagcgcagcctgctgggtgcctcccagaaccgtttcgaatccaccatcactaacctgaacaacaccgtgagcaacctgtcagcggcccgcagccgtattcaggactccgactatgcgaccgaagtgtcgaacatgtcccgcgcgcagatcctgcagcaggccggttcttccgtgctggcacaggccaaccaggttccgcagaccatgctgtccctgctgcgttaa

SEQ ID NO: 219 - DNA, 789 bp, Kosakonia cowanii
  source 1..789: mol_type = genomic DNA
atggctgttattaatactaacaccctgtcgctgatgacccagaacaacctgactaaatcacagtcttctctgggcacctcgattgagcgtctctcttccggtctgcgtatcaacagcgcgaaagacgatgctgctggtcaggcgatcgcgaaccgctttacttctaacatcaacggcctgaccgttgctgcccgtaacgctaacgacggtatctctctggcacagaccgctgaaggcgcgctgagcgaagtgaacaacaacctgcagcgtatccgtgacctgaccgttcaggcgcagaacagctccaactccgcgtctgacatcgactccatccaggctgaagttaaccagcgtatggaagagatcaaccgcgtgaccacccagaccgacttcaacggcattaaagtgctgaacaccggtaccggttcaagcagctacagcttccaggtcggttctaaagatagcgaaactatctccatcagcctgaccaagtctgactcctacaacctgtacaatgcgactggtgcaacagcgcagactaccggccagaccatcaacggcaacaaacgttctactgccgctgaaggcttcgacgtactgaaaggtactgttgatgcgtccggtagcaccgatggcagcccgctggcagatatcgataaggccatcaaagcggttgacgatcagcgcagcctgctgggtgcctcccagaaccgtttcgagtccaccatcactaacctgaacaacaccgtgagcaacctgtcagcggcccgcagccgtattcaggactcc

SEQ ID NO: 220 - DNA, 789 bp, Kosakonia cowanii
  source 1..789: mol_type = genomic DNA
atggctgttattaatactaacaccctgtcgctgatgactcagaacaacctgactaaatctcagtcttctctgggtacatctattgagcgcctgtcttccggcctgcgtattaacagtgctaaagatgatgccgcgggccaggcaattgccaaccgctttacttctaacatcaatggcctgaccgttgctgcccgtaacgccaacgacggtatctctctggcacagaccgctgaaggcgcgctgagcgaaattaacaacaacctgcagcgtatccgtgacctgaccgttcaggcgcagaacagctccaactccgcgtctgacatcgactccatccaggctgaagttaaccagcgtatggaagaagtgaaccgcgtgaccacccagaccgacttcaacggcatcaaagtgctgaacaccggtaccggttcaagcagctacagcttccaggttggcgcgaaagatagcgaaactatctccatcagcctgaccaagtctgactcctacaacctgtacaatgcgaccggtgcaaccgcagcgactaccggccagaccatcaacggcaacaaacgttctactgccgctgaaggcttcgacgtactgaaaggtactgttgatgcgtccggtaacaccgatggtagcccgctggcggatatcgataaggccatcaaagcggttgacgatcagcgcagcctgctgggtgcctcccagaaccgtttcgagtccaccatcactaacctgaacaacaccgtgagcaacctgtcagcggcccgcagccgtattcaggactcc

SEQ ID NO: 221 - DNA, 906 bp, Kosakonia cowanii
  source 1..906: mol_type = genomic DNA
atggctgttattaatactaacaccctgtcgctgatgacccagaacaacctgactaaatcacagtcttctctgggcacctcgattgagcgtctctcttccggtctgcgtatcaacagtgcaaaagatgatgctgctggtcaggcgatcgccaaccgtttcacctctaacatcaatggtcttaccgttgctgcccgtaacgccaacgacggtatctccctggcgcagactgctgaaggcgcgctgagcgaagtgaacaacaacctgcagcgtatccgtgacctgaccgttcaggcacagaacagttccaactccgcgtccgatatcgactccatccaggctgaagttaaccagcgtatggaagagatcaaccgcgtgaccacccagaccgacttcaacggcattaaagtgctgaacaccggtaccggttcaagcagctataacttccaggttggttctaaagataacgaaactatctccatcagcctgagcaagtctgactcctacaacctctataacgccactggtgcaactgcggtaaccaccacccagaccatcaacggtaacgcgcgttctacttctgctgaaggcttcgacgtactgaaaggtaccgttgactccactggcggtaccaacggtgctccgctggcagatatcgatgcggccatcaaagcagttgacgatcagcgcagcatgctgggtgcgtcccagaaccgtttcgagtccaccatcactaacctgaacaacaccgtgagcaacctgtcagcggcacgcagccgtattcaggactccgactatgcgacggaagtgtcgaacatgtcccgcgcgcagatcctgcagcaggctggttcttccgtgctggcgcaggccaaccaggttccgcagaccatgctgtccctgctgcgttaa

SEQ ID NO: 222 - DNA, 909 bp, Kosakonia cowanii
  source 1..909: mol_type = genomic DNA
atggccgtcatcaataccaatacgctgtcactcatcaaccaaaataaccttaataaatcccaggcggcgcaaagctctgcaattcagcgtttatcctccggcctgcgtattaatagtgcgaaagatgatgctgcgggccaggcaattgccaaccgtttctcttccagcattagcggtatgggcgtggccgcaagaaatgccaacgatgctatttcgctggcacaaacggctgaaggtgcattaagcgaaatcaataacaacttgcagcgtatccgcgatctggccgtgcaggcgcaaaacagcactaactctgcctccgatgtcgactctattcagtcggaagtgaatgagcgtatggccgagattaaccgcgtgaccctgcagactgatttcaacggtatcaaaattctcaataccagctccggtacggccagttacggcttccatgtagggacagatgatggcgaagagattgttatcacgatgagcagcagcgatgactacaacctgggggcaaattccggttcgattggccaggtctctggcgaattcattcacggcaatgcacgcagcgtaaaagcagtcggctttgatgtgctccatggcaccgtcaccccctttagcggtgcgatactcaataatccccttgccgccattgacgatgcgataaaagccgtcgatacccaacgcagttcgctcggggcatttcagaaccgctttgaatcgacgatcaataaccttaatcaggcggcgacgaatctttccgccgcgcgcagccgaatcaatgacgccgactatggcacggaagtgtcgaatatgagcagggcgcagatattacaacaggccggctcgtccgtgctggcgcaggccaaccaggtgccgcagaccatgctgtcgctgctgcgttaa

SEQ ID NO: 223 - DNA, 445 bp, Kosakonia cowanii
  source 1..445: mol_type = genomic DNA
atggctgttattaatactaacaccctgtcgctgatgacccagaacaacctgactaaatcacagtcttctctgggtacctcgattgagcgtctctcttccggtctgcgtatcaacagtgcaaaagatgatgctgctggtcaggcaatcgccaaccgctttacttccaacatcaatggcctgggtgttgctgcccgtaacgccaacgacggtatctctctggcgcagaccgctgaaggcgcgctgagcgaagtgaacaacaacctgcagcgtatccgtgacctgaccgttcaggcacagaacagctccaactccgcatctgacatcgactccatccaggctgaagttaaccagcgtatggaagagatcaaccgcgtgaccacccagaccgacttcaacggcatcaaagtgctgaacaccggtaccggttcaagcagctacagcttcc

SEQ ID NO: 224 - DNA, 924 bp, Kosakonia cowanii
  source 1..924: mol_type = genomic DNA
atgcgtcttagcacaagttatatttttcaaaaccgcatagacagcctgggcgacgcgatgacgggttacaacgacctggcgacccgcctctctgctggccagacgctgctgaagccctctgacgatccgaccggcgcgtcgcagtctgtcactttacaaacggcgctgtcgcgcatgagccagttcgacaccgcgcgcacctacgcgcaggatgcgctgggccaggaagataacaccctggactctatcggcaacttgctgacagagaacctgacgcagaaagtgattgccggtggtaacggtgcttactctgacgaagatcgcgccgcgctggcggaagagttacagggcatccgcgataacctgctggatctggcgaacaccaaaaacagtgacggtcgctatatttttgccggctataaaaccggcagcgcgccgttccaggccgatggcacctatgtcggcggcgataccgccatgacgcaggtggtctctgacagcaccgaaatgcaggtcggtcataccggctcagaggtgtttatgagcggcacgccggacgatctgtttgaagccctcgacaacgcgattgcgcagttgaaacagccggtcaccagcgatgctgacagggacgcgctgcaggctgtgctggatgactccaatgtcagcatcaagaagaatattgataacctcggcaaggtgcgcgccaccgtcggtaccaatatgcagcagattgaatcgctgggattcagcgctgaggctcaaagcatcaatgtgcagagccgcctgcaggaaaccttaggttcggactgggactcgatgattaccctgttatcccagtcaaagatgtcggaattcgcgcttaattcttccatgacggtatttcagtcgatgcagcagctctctattttcaaagtaatgggttga

SEQ ID NO: 225 - DNA, 357 bp, Kosakonia cowanii
  source 1..357: mol_type = genomic DNA
atggctgttatcaatactaacaccctgtcgctcacgactcagaacaacctgactaaatcacagtcttctctgggcaccgctattgagcgtctctcttccggtctgcgtatcaacagtgcaaaagatgatgctgctggtcaggcgatcgcaaaccgtttcacctctaacatcaatggtctgggtgttgcagcgcgtaacgccaacgacggtatctcgctggcacagaccgctgaaggcgcgctgggcgaaatcaacaacaacttacagcgtatccgtgacctgaccgttcaggcacagaacagctccaactccgcgtccgacatcgactccatccaggctgaagttaaccagcgtatg

SEQ ID NO: 226 - DNA, 195 bp, Kosakonia cowanii
  source 1..195: mol_type = genomic DNA
tatcgatgcggcgatcaaatcggttgactcccagcgcagcctgctgggtgcgtcccagaaccgttttgaatccaccatcaccaacctgaacaacaccgtgagcaacctgtcgtctgcccgcagccgtattcaggactccgactacgcgaccgaagtgtcgaacatgtcccgcgcgcagatcctgcagcaggccgg

SEQ ID NO: 227 - DNA, 305 bp, Kosakonia cowanii
  source 1..305: mol_type = genomic DNA
atggctgtcattaatactaacaccctgtcgctgacgacccagaacaacctgactaaatcacagtcttctctgggtaccgctattgagcgtctctcttccggtctgcgtatcaacagtgcaaaagatgatgctgctggtcaggcaattgctaaccgtttcacctccaacatcaatggcctgggtgttgcagcgcgtaacgccaacgacggtatctccctggcacagaccgctgaaggcgcgctgggcgaaatcaacaacaacttacagcgtatccgtgacctgaccgttcaggcacagaacagctc

SEQ ID NO: 228 - DNA, 767 bp, Kosakonia cowanii
  source 1..767: mol_type = genomic DNA
atggctgttattaatactaacaccctgtcgctgatgacccagaacaacctgactaaatctcagtcttctctgggcaccgctattgagcgcctgtcttccggcctgcgtattaacagtgcgaaagatgatgccgcgggccaggctatcgccaaccgctttacttccaacatcaatggcctgtccgtcgcagcgcgtaacgccaacgacggtatctccctggcacagaccgctgaaggcgcgctgggcgaaatcaacaacaacctgcagcgtatccgtgacctgaccgttcaggcgcagaacagctccaactccgcgtccgatgtcgactccatccaggctgaagttaaccagcgtatggaagagatcaaccgcgtgaccacccagaccgacttcaacggcattaaagtgctgaacaccggtaccggcaccagcagctacagcttccaggttggcgcgaaagataacgaaactatctctatcagcctgagctcctctaacgcctacaacctgtacaacgccaccggcgccactgcacagactaccggccagaccatcaacggcaacgcccgtagcaccgcagccgaaggcttcgatgtgcttcagggtaccgtaagcagcggcggcgctaccaacggctctccgctggcggatatcgatgcggcgatcaaatcggttgactcccagcgcagcctgctgggtgcgtcccagaaccgttttgaatccaccatcaccaacctgaacaacaccgtgagcaacctgtcgtctgc

SEQ ID NO: 229 - DNA, 1257 bp, Kosakonia cowanii
  source 1..1257: mol_type = genomic DNA
atgtcccaggttattaatactaacgcccttagcctcgtcgctcagaacaacctgaataaatctcagggctctctgggtactgcaattcagcgtctctcttctggtctgcgtattaacagcgcgaaagacgatgcagcaggtcaggcgatctctaaccgtttcaccgccaacatcaacggcctgagccaggcttcccgtaacgccaacgatggtatctccattgcacagaccactgaaggcgcgctgaacgaaatcaacgacaacctgcagaacatccgtcgtctgtccgtacaggcgcagaacggcaccaactccgattctgaccgtcagtccatccaggacgaaatcgacgcgcgtctggacgagatcaaccgtatctctgaacagactgagttcaacggcgtgaaagtgctgagcaaagatcagagcctctctattcaggtaggttctaacgatggtcagactatcgatatcgaactgagcaaaatggattccagcaccctgagcatggatggtttcagcgtagctaacggcatcgaccctactaccctgactgcaagcactggtacagtgaaagttgacagtggtttcgactacgatgctactaaattcaacgactccactaccggtactgcggtaaccagcatcgacgatatcgtggttgatgataacggcgacgtctttgcagtgaaaggcgctgaaatgtacgccgtaaccgaagatccgacgactggtgagatctccttcgactccggtactgacgttgccagcactgttgtaggcaccccgaccagcgttgtgggtgaagatatgatgaaagaccaggctattaacatgaccggtatcaccggtacgttaatggaagatggtaaaggtaactactacgttgacgacggtgccggcaacctgactgaagcaactattgataccactacctggactgcaacggataccggtaaagctgtttctactactccggcaacttccgatccgctgaccaaaatcgacgaagcgctggcacaggttgatgaaatgcgttccggtctgggtgcggtacagaaccgtttcgcgtctgttatcagcaacctgaacaacaccgttaacaacctgtctgaatcccgctctcgtattctggatgctgacttcgcgtctgaagtatctgaaatgagccgcgcgaacattctgcagtctgcaggcaccaccgtgctggcacaggctaaccaggttccgcagaacgttctgtctctgctgcgttaa

SEQ ID NO: 230 - DNA, 909 bp, Kosakonia cowanii
  source 1..909: mol_type = genomic DNA
atggctgttatcaataccaatacgctgtcactcatcaaccaaaataaccttaataaatcccaggcggcgcaaagctctgcaattcagcgtttatcctcaggcctgcgtattaacagcgcgaaagatgacgctgcgggccaggcgattgccaaccgtttctcctccagcattaacggcatgggcgtggccgcaagaaatgccaacgatgctatttcgctggcacaaacggctgaaggcgcattaagcgaaataaataacaacttgcagcgtatccgcgatctggccgtgcaggcgcaaaatagcactaactctgcctccgacgtcgactctattcagtcggaagtgaatgaacgtatggccgagattaaccgcgtgacccgccagacagactttaacggcatcaaaattctcgatagcggctctggttcgtttggttacggcttccaggtgggtgctgatgatggcgaagagattgttctcacgataggtggcagcgatgactataacctgggggcaaattccggttcgattggcgaagtctctggcgaatttatccacggtaacgcgcgtagcgtaaaagcaatgggctttgatgtgctccatggcaccgtcaccccctacagcggtgcgatactcaataatccgcttgccgccattgacgatgcgataaaagccgtcgatacccaacgcagttcgctcggggcatttcagaaccgctttgaatcgacgataaacaacctcaatcaggcggcgaccagtctctccgctgcgcgcagccgaataaatgacgccgactatggtacggaggtctcaaatatgagcagggcgcaaatattacaacaggccggctcgtccgtgctggcgcaggccaaccaggtgccacagaccatgctgtcgctgctgcgttaa

SEQ ID NO: 231 - DNA, 924 bp, Kosakonia cowanii
  source 1..924: mol_type = genomic DNA
atgcgtcttagcacaagttatatttttcaaaaccgcatagacagcctgggcgacgcgatgacgggttacaacgacctggcgacccgcctctctgctggccagacgctgctgaagccctctgacgatccgaccggcgcgtcgcagtctgtcaccttacaaacggcgctgtcgcgcatgagccagttcgacaccgcgcgcacctacgcgcaggatgcgctgggccaggaagataacaccctggactctattggcaacttgctgacagagaacctgacgcagaaagtgattgccggtggtaacggtgcctactctgacgaagatcgcgctgcgctggcggaagagttacagggcatccgcgataacctgctggatctggcgaacactaaaaacagcgacggtcgctatatttttgccgggtataaaaccggcagtgcgccgttccaggctgatggcacctatgtcggcggcgataccgctatgacccaggtggtctctgacagcaccgaaatgcaggttggccataccggtgatgatgtctttctgagcggtacgccggacgatctgtttaaagccctcgacaacgcaattgcgcagctgaagcagccgatcaccagcgatgcggacagggatgcgctacaggctgtgctggatgattccaatgtcagcattaagaaaaatatcgataacctcggcaaggttcgcgccaccgtcggtaccaatatgcagcagattgaatcactgggattcagcgctgaggcacaaagcatcaatgtgcagagccgcctgcaggaaaccttaggttcggactgggactcgatgattaccctgttatctcagtcaaagatgtcggaattcgcccttaattcctccatgacggtatttcagtcgatgcagcagctctctattttcaaagtaatgggttga

SEQ ID NO: 232 - DNA, 399 bp, Kosakonia cowanii
  source 1..399: mol_type = genomic DNA
atggctgttattaatactaacaccctgtcgctgatgacccagaacaacctgactaaatcacagtcttctctgggtacttctattgagcgtctctcttccggtctgcgtatcaacagtgcaaaagatgatgctgctggtcaggcaattgccaaccgctttacttccaacatcaatggcctgggtgttgctgcccgtaacgccaacgacggtatctccctggcgcagaccgctgaaggcgcgctgagcgaagtgaacaacaacctgcagcgtatccgtgacctgaccgttcaggcgcagaacagctccaactccgcatctgacatcgactccatccaggctgaagttaaccagcgtatggaagagatcaaccgcgtgaccacccagaccgacttcaacggc

SEQ ID NO: 233 - DNA, 789 bp, Kosakonia cowanii
  source 1..789: mol_type = genomic DNA
atggctgttattaatactaacaccctgtcgctgatgacccagaacaacctgactaaatctcagtcttctctgggtacatctattgagcgcctgtcttccggcctgcgtattaacagtgctaaagatgatgccgcgggccaggcaattgccaaccgctttacttctaacatcaatggcctgaccgttgctgcccgtaacgccaacgacggtatctctctggcacagaccgctgaaggcgcgctgagcgaaattaacaacaacctgcagcgtatccgtgacctgaccgttcaggcgcagaacagctccaactccgcgtctgacatcgactccatccaggctgaagttaaccagcgtatggaagaagtgaaccgcgtgaccacccagaccgacttcaacggcatcaaagtgctgaacaccggtaccggttcaagcagctacagcttccaggttggcgcgaaagatagcgaaactatctccatcagcctgaccaagtctgactcctacaacctgtacaatgcgaccggtgcaaccgcagcgactaccggccagaccatcaacggcaacaaacgttctactgccgctgaaggcttcgacgtactgaaaggtactgttgatgcgtccggtaacaccgatggcagcccgctggcggatatcgataaggccatcaaagcggttgacgatcagcgcagcctgctgggtgcctcccagaaccgtttcgagtccaccatcactaacctgaacaacaccgtgagcaacctgtcagcggcccgcagccgtattcaggactcc

SEQ ID NO: 234 - DNA, 501 bp, Kosakonia cowanii
  source 1..501: mol_type = genomic DNA
gtgctgaacaccggtaccggttcaagcagctacagcttccaggttggcgcgaaagataacgaaactatctccatcagcctgaccaagtctgactcctacaacctgtacaacgccactggcgccactgcagcgactaccggccagaccatcaacggcaacaaacgtgccaccgctgctgaaggcttcgacgtactgaaaggtaccgttgatgcgtccggtaaaaccaacggtgctccgctggcagatatcgatgcggccatcaaagcggttgacgatcagcgcagcctgctgggtgcctcccagaaccgtttcgaatccaccatcactaacctgaacaacaccgtgagcaacctgtcagctgcccgcagccgtattcaggactccgactacgcgaccgaagtgtcgaacatgtcccgcgcgcagatcctgcagcaggccggttcttccgtgctggcacaggccaaccaggttccgcagaccatgctgtccctgctgcgttaa

SEQ ID NO: 235 - DNA, 399 bp, Kosakonia cowanii
  source 1..399: mol_type = genomic DNA
atggctgttattaatactaacaccctgtcgctgatgacccagaacaacctgactaaatcacagtcttctctgggcacctcgattgagcgtctctcttccggtctgcgtatcaacagcgcgaaagacgatgctgctggtcaggcgatcgcgaaccgctttacttctaacatcaacggcctgaccgttgctgcccgtaacgctaacgacggtatctctctggcacagaccgctgaaggcgcgctgagcgaagtgaacaataacctgcagcgtatccgtgacctgaccgttcaggcgcagaacagctccaactccgcatctgacatcgactccatccaggctgaagttaaccagcgtatggaagagatcaaccgcgtgaccacccagaccgacttcaacggc

SEQ ID NO: 236 - DNA, 384 bp, Kosakonia cowanii
  source 1..384: mol_type = genomic DNA
gtgctgaacaccggtaccggttcaagcagctacagcttccaggtcggttctaaagatagcgaaactatctccatcagcctgaccaagtctgactcctacaacctgtacaatgcgactggtgcaacagcgcagactaccggccagaccatcaacggcaacaaacgttctactgccgctgaaggcttcgacgtactgaaaggtactgttgatgcgtccggtagcaccgatggcagcccgctggcagatatcgataaggccatcaaagcggttgacgatcagcgcagcctgctgggtgcctcccagaaccgtttcgagtccaccatcactaacctgaacaacaccgtgagcaacctgtcagcggcccgcagccgtattcaggactcc

SEQ ID NO: 237 - DNA, 906 bp, Kosakonia cowanii
  source 1..906: mol_type = genomic DNA
atggctgttattaatactaacaccctgtcgctgatgacccagaacaacctgactaaatcacagtcttctctgggcacctcgattgagcgtctctcttccggtctgcgtatcaacagtgcaaaagatgatgctgctggtcaggcgatcgccaaccgtttcacctctaacatcaatggtcttaccgttgctgcccgtaacgccaatgacggtatctccctggcgcagactgctgaaggcgcgctgagcgaagtgaacaacaacctgcagcgtatccgtgacctgaccgttcaggcacagaacagctccaactccgcgtccgatatcgactccatccaggctgaagttaaccagcgtatggaagagatcaaccgcgtgaccacccagaccgacttcaacggcattaaagtgctgaacaccggtaccggttcaagcagctataacttccaggttggttctaaagataacgaaactatctccatcagcctgagcaagtctgactcctacaacctgtataacgccactggtgcaactgcggtaactaccacccagaccatcaacggtaacgcgcgttctacttctgctgaaggcttcgacgtactgaaaggtaccgttgactccactggcggtaccaacggtgctccgctggcagatatcgatgcggccatcaaagcagttgacgatcagcgcagcatgctgggtgcctcccagaaccgtttcgaatccaccatcactaacctgaacaacaccgtgagcaacctgtcagcggcacgcagccgtattcaggactccgactacgcgacggaagtgtcgaacatgtcccgcgcgcagatcctgcagcaggctggttcttctgtgctggcgcaggccaaccaggttccgcagaccatgctgtccctgctgcgttaa

SEQ ID NO: 238 - DNA, 1245 bp, Kosakonia cowanii
  source 1..1245: mol_type = genomic DNA
atgtcccaggttattaatactaacgcccttagcctcgtcgctcagaacaacctgaacaaatctcaggactctctgggtactgcaattgaacgtctctcttctggtctgcgtattaatagcgcgaaagacgatgcagcaggtcaggcgatctctaaccgtttcaccgccaacattaacggtctgactcaggcttcccgtaacgccaacgatggtatctccattgcacagaccactgaaggcgcgctgaacgaaatcaacgacaacctgcagaacatccgtcgtctgtccgtacaggcacagaacggcaccaactccgattctgaccgtcagtccatccaggacgaaatcgacgcgcgtctggacgagatcaaccgtatctctgaacagaccgagttcaacggcgtgaaagtactgagcaaagatcagaagctctctatccaggttggttctaacgatggtcagactatcgatatcgaactgaaccagatggatgcctctactctcggtatggacggcttcaccgttgcaagcggtgttgatgctactaaactgaccacaaccactgatattaatgtcaaagttgccgttgctgatgatctgagcaacgttaccgactctgcgggtggtactgttgctgcagaagaagtggtaaccggctctgacggtaaaacctatgttgttggtgacgatggtaactactacgaagcaaaagcaaatgctgctggtgacggtatcgaatttgacaccggtactgttgcaaccactactggtgtaaccatgagctccgataaatcaggctcttctgttagcgtaactcagacggctgatttgggttctctgactgaagatctggtaacggatggtgaaggtaacttctacctgcaagatgctaacggcagcgtatatgaagcaaccgctgacgcaaccggcgcggtgaccaaaggtgaaagactttctaccgctgcggccactgacgatccgctgaccaaaattgacgacgcgctggcgcaggttgatgaaatgcgttccggtctgggtgcggtacagaaccgtttcgcgtctgttatcagcaacctgaacaacaccgttaacaacctgtctgaatcccgctctcgtattctggatgctgacttcgcgtctgaagtatctgaaatgagccgcgcgaacattctgcagtctgcaggtaccaccgtgctggcacaggctaaccaggttccgcagaacgtgctgtctctgctgggctaa

SEQ ID NO: 239 - DNA, 924 bp, Kosakonia cowanii
  source 1..924: mol_type = genomic DNA
atgcgtcttagcacaagttatatttttcaaaaccgcatagacagcctgggcgacgcgatgacgggttacaacgacctggcgacccgcctctctgctggccagacgctgctgaagccctctgacgatccaaccggcgcgtcgcagtctgttactttacaaacggcgctgtcgcgcatgagccagttcgacaccgcgcgcacctacgcgcaggatgcgctgggccaggaagataacaccctggactctatcggcaacttgctgacagagaacctgacgcagaaagtgattgccggtggtaacggtgcttactctgacgaagatcgcgccgcgctggcggaagagttacagggcatccgcgacaacctgctggatctggcgaacaccaaaaacagcgacggtcgctacatttttgccggctataaaaccggcagcgcgccgttccaggtcgatggcacctatgtcggcggcgataccgccatgacgcaggtggtctctgacagcaccgaaatgcaggtcggtcataccggctcagaggtgtttatgagcggcacgccggacgatctgtttgaagccctcgacaacgcgattgcgcagttgaaacagccggtcaccagcgatgctgacagggacgcgctgcaggctgtgctggatgactccaatgtcagcatcaagaagaatattgataacctcggcaaggtgcgcgccaccgtcggtaccaatatgcagcagattgaatcgctgggattcagcgctgaggctcaaagcatcaatgtgcagagccgcctgcaggaaactttaggttcggactgggactcgatgattaccctgttatcccagtcaaagatgtcggaattcgcgcttaattcttccatgacggtatttcagtcgatgcagcagctctctattttcaaagtaatgggttga

SEQ ID NO: 240 - DNA, 1113 bp, Kosakonia cowanii
  source 1..1113: mol_type = genomic DNA
atgcacaaattggtagccatgtacctgcctcaattccatccggtcaagcgaaataatgaatggtggggtgagggtttcacggagtggcgtaatgttgttaaagcaaaaccgcgttttcctgggcaccatcaaccgcagttaccggccgatttaggctattatgatctccgccttgcagagacgcgcaatcatcaggcaaagatggccaaagagcatgggattcatggtttttgctattatcactattggttcaatggtgaattattgcttgagcagcctgttgaagcgatgctgaattcacaggatcccgattttcctttttgcctttgctgggcaaacgaaaactggacccgtgcgtgggatgggatggagcgtgaagtgttaatcaagcaggattacactgctgatgatgcaatggctcatatgagatatctcgctccgtattttaaagataagcgccacattcgcgttggcgacaagcccgtcttcttgatttatcgagtagataatattcccgagccgaaaaaatacattcaatcattgcgcaattatgcagcagaaaatggtgttcccgcccttcacttggtggcagtcaaaaatggctttgtagagttgccggacgcagaaatattatcgcttggttttgatgccatcatggattttcagccaaatcgtgctgatttccctaagcaaaataaatcctcatcccagcgactcgtcgatatcgcgcgcaaagtgctgccagcctcggtttatcaggcccttaaaggtaatgtttcagcggtcaatcgaatcgactacaaacagctagtagcagaaaaaaccgcacaggtatggccaaaagattacgtgaagtatcctgcggtattcccctcatgggacaataccgctcgccgcaaaacgcctacggttatacaaaacaacgatcctgccgattatcagaaatggctggagtacgcgattgtgtcaaccagctcttatgacgacgatcagcagttcgtgttcattaacgcctggaacgagtgggcggaagggtgccatcttgaaccagatgagaagatgggtaaaacattcctggatgtcaccaaaaaagttatcgaaagacactcttaa

SEQ ID NO: 241 - DNA, 1074 bp, Kosakonia cowanii
  source 1..1074: mol_type = genomic DNA
atggatttttatacattctcctcaagggaaatattgtcggtggacaaaagtaactggttcggaatagtgaaaaaccagttctcattttattttgcgttttatattttaagctttccgctaacttacttactattctattttggttttctttctcaagagtatatcgtttggttttatttgatactggtggctgagcacctgtctcaagaatccatgcgattacttgtggtgctagacaaggcatttaaagccaacttatcactatttattcgttccgggatatgggtttatatcgcggttgttgtcatgttctttgatattgatttgcgtcaagtatcagtaattttgatactttggctaataggatcaagtgcctctgtaatacttattatacctgatctcatcgagctgaggcgaagtgccataggatcacgtaatattgatcttggctggatgtggaaaggtgtgaaagttgccgtaccattgctggttgggactctggccttgcgctcgctctatatcgttgaccgctattcattaagttattttagtgattattcagccgttggtatttattcattttactcgagttttgcaaatgctctgctagcattcgttgatgccgttgtcgttatgcaactttatccgaaaatagtgagcgcggtgaagcaaagtgatgcggtaaatcttagggtgtataaaaagaaattcattacatcagtggcgttcttaagcttggttctttttattactttgccagttggggtatacattttattaaaatggatgaataaaccagaatatttttcctatttctcagtgctggctgttttaatggcggcatgtgtgatctactgtttcgcccttttaccacactacgaactttatgcgcgtaatgaagatagaaaaataattttctcttcgctgtgggctgcggccgttggcgcaatcgcaatgcctgctggcgcatattattatggtgtatatggcgtcgcggcagggcaattattggctgtgattttcttatgtatttacaaagttatcctgttgaggaagagtaagctgaatgtttaa

SEQ ID NO: 242 - DNA, 930 bp, Kosakonia cowanii
  source 1..930: mol_type = genomic DNA
atgtttaaaaatatttgcgtcattgttcctacgtgcaatggaggagctatatggaaacaagctgcatcagaactatcgaaactgcaaagtgagcatgtaaaagttgtcgctatcgattctgaatctactgattcaacccggcaaattgcggtcgattatggctttgatgttcttgatgtgaaaagaaccaattttaatcatggcggcacacgcaatttggcagcgcaatattgcattgaaaaactcaatgccggcctgcttatcttcctgacgcaggatgctattttgcaatctgccgaaacagtaattgcagaaataactaaagcattctcagccaatacaaaactttcagcgctgtatgggcgtcagttaccacatgataacgcgaatgcaattgcacagcacgccagatattacaattataaaaacagcggatataaagcaacacctgagaatcataaagcgatgggcttaaaagccgtcttcttgtctaattctttcgctgtctatagcgttgatatctttatacagcttaacggatttcctgagaacactattctctgtgaggatatgttttacgctgcaaaatccattcaaaatggttttgctattgcatactgcccagatgtagctgtgaagcactcacataattactctcctgttgatgagtttaaacgctattttgatatcggtgtgttccacgctgaagaaccctggattggaaaatacttcggaggggcgagtggggaaggtaagaattttctaatctctgaatttaaatttttgcttaagaataaacctttgctaatgttgaacgcttcggtaaataatgccatgaaaatactaggttataaggttggtaaaaattataaaaaacttcctgcgtcactgtgcaaaaagcttagcatgcataaagcatattggaaataa

SEQ ID NO: 243 - DNA, 1386 bp, Kosakonia cowanii
  source 1..1386: mol_type = genomic DNA
atggcaattgttgacacaattaatgtgatattgccttttttcttatcgttaggaataattgattatattacaagtaacctgccaagatttattcctcagcgtgaatttgacgaccgcgtaattacgcatatctctcttagcttgatttgtaccgcatggttttggttaagactaaggcattactcatatcgcaaacctttttggtttgagctgaaagaaatcctgcgcacactggctatctttgccattattgagctgtctgtaatcgccttttcaaaatggcaatcttcccgctatctatgggttcttacctggacactaacgatgcttatggtgccaattggacgcaccgtggctcgtcgtattctggatcgcttcggctactggaaaaaaacaaccattatcatcggcactggtaaaaatgcagttgatgcatgcagcgcattacgcagtgaagaaagcctgggttttgacgtccagtacatgttcggaacttcacctggttatgccaataaaattgaaggtgtgacctttattaccgatgaagcatggctcatttcgcacttcaaagataaagttgcgcagtttgttattgccgtcgagtccgacgagacggatgttcgagactattggttaaaaacgctttcaattaatggttttcgccatgtatcggtgattcctacgacacgaggcttgcccctatatggcaccgatatggcatttcttttcagtcatgaggtgatgatattccgggttaacaataacctggcaaaacgcacctctcgtttcgttaagcgcacattcgacattatctgttctctgctcatcattctgattagctccccgttgatgatctacctatggtacaaagtgacacgcgacggtgggccggcgatttatggccatatgcgtgtagggcgccacggcaagcttttcccatgctataaatttcgttcaatggtaatgaattctcaggaagtgctacagcaactgttgagtaccgacccggaagcaagggctgagtgggaacgggatttcaaactaaagaacgatccgcgtattacacctgttggccgtttcattcgccgcacgagccttgatgaattaccacaattattcaatgtgcttagaggtcaaatgagcctggtaggtccacgacccatcatctccgaagaacttagtcgttatgacgaaaatgttgattattatttgatggctaagccaggtatgaccggtttgtggcaggtaagcgggcgtaatgacgtcgattacgatacgcgcgtctattttgattcctggtatgtaaaaaactggtcgctgtggaacgatatcgctattttgtttaaaaccatcaaagttgttttgcatcgtgatggcgcttactaa

SEQ ID NO: 244 - DNA, 863 bp, Kosakonia cowanii
  source 1..863: mol_type = genomic DNA
atgtccaataatcacttcttgcaactgtccaacgtagcgattcgcggcttgacgttagccagcaaattcttacttatcttttttcttgcccgatttctcgagccggctgagctgggtatctatggcttgctgacggcaacggtgggatattccttatatctcttgggtttcgatttctatacctacagtacccgtgagctgctcaagcgaggtcgcgaggaatggggtggggtgatcaaagcccaagccgctttgaccgtgctcctctacgcgattttcctgccactgttgagtttgatctttgttgaagatctgttgccgatgagcgttatcggttggttttttgcgctgctgatactcgagcatcttactcaggagctaggtcgtttgttggttgcggtgtcggatcagctctatgccagtctcatgctgttttttcgctcaggagtctgggcggtcctggtcactgggctgatgtttgtcatgcctgaggcccgagaccttaacgtcgtatttggggcttgggcagtgggtggggggatagctctgcttctaggtatttgcagaatcaagcgtatgaggctcgacggatggcgacaggaggtagattgggcttggatcattaaagggctgaagatagcctttgcgctcctggttgcgacgttagcgattcgaggcctcttcacactggatcgatactggtttcaagcattggcgggtatggaggtgttgggcgcttatgtcctgtttacgggcatcagcatggcgctaatttcgttccttgatgctggtgtatttgcgtttatttaccctgatttgatcagttcgtaccagcggtccgatggcgacgggtttcgccggag

SEQ ID NO: 245 - DNA, 682 bp, Kosakonia cowanii
  source 1..682: mol_type = genomic DNA
ggccggtccgcgactgcactcgcgtcccgtggccggtctgcctctcgtgcacgtcgacttcccgcgcatggaggggtcgagccgcttcctcaagcgcgtcttcgacctgatcggatcggcagcgctactcctggtcttctcaccggtcttcctcgttacggccatcgcgatcaaaatcgacggccctggccgcgtcttctaccaccaggagcgcatcggacggggcggtcgaacgttcggaatgcgcaagttccggtcgatggtcgccaacgccgacgaccaactcgctagcctgctcgatctgcaggggtcgagcgagactccgcttttcaaagtgtcggacgatccgcgcatcaccaagaacggtcgcttcctgcgcaagcactcgatcgacgagctcccgcagctcatcaatgtcctgcgcggcgagatgagcctcgtcggtccgcgaccgcagcgtgcggcggaggtcgctctctacgatgacatcgctctgcgtcgtctcgctgtcaagccaggcatgagcggcctgtggcaggtcagtgggcgttccacgctgtcgtgggaggagacgatccgcctcgacttgtactacgtcgagaactggtctctcactcaggacgtcgtcatccttttccgcaccatccgggccgtcgtcgcccccggtgcgagcgcgcactga

SEQ ID NO: 246 - DNA, 1386 bp, Kosakonia cowanii
  source 1..1386: mol_type = genomic DNA
atggcaattgttgacacaattaatgtgatattaccttttttcttatcgttaggaataattgattatattacaagtaacctgccaagatttattcctcagcgagagtttgacgaccgcgtaattacgcatatctctcttagcttgatttgtaccgcatggttttggttaagactaaggcattactcatatcgcaaacctttttggtttgagctaaaagaaatcctgcgcacactggctatctttgccattattgagctgtccgtaatcgccttttcaaaatggcaatcttcccgctatctatgggttctcacctggacactgacgatgcttatggtgccaattggacgcaccgtggctcgtcgtattctggatcgcttcggctactggaaaaaaacaaccattatcgtcggcactggtaaaaatgcagttgatgcatgcagcgcattacgcagtgaagaaagcctgggttttgacgtccagtacatgttcggaacttcacctggttatgccaataaaactgaaggtgtgacctttattaccgatgaagcatggctcatttcgcacttcaaagataaagttgcgcagtttgttattgccgtcgagtccgacgagaccgatgttcgagactattggttaaaaacgctttcaattaatggttttcgccatgtatcggtgattcctacgacacgaggcttgcccctatatggcaccgatatggcatttcttttcagtcatgaggtgatgatattccgggttaacaataacctggcaaaacgcacctctcgtttcgttaagcgcacattcgacattatctgttctctgctcatcattctgatcagctccccgttgatgatctacctatggtacaaagtgacacgcgacggtgggccggcgatctatggccatatgcgggtagggcgccacggcaagcttttcccatgctataaatttcgttcaatggtaatgaattctcaggaagtgctacagcaactgttgagtaccgacccggaagcaagggctgagtgggaacgggatttcaaactaaagaacgatccgcgtattacacctgttggccgttttattcgccgcacgagccttgatgaattaccacaattattcaatgtgcttagaggtcaaatgagccttgtaggtccacgaccaatcatctccgaagaacttagtcgttatgacgaaaatgttgattattatttgatggctaagccaggtatgaccggtttgtggcaggtaagcggacgtaatgacgtcgattacgatacgcgcgtctattttgattcctggtatgtaaaaaactggtcgctgtggaacgacatcgctattttgtttaaaaccatcaaagttgttttgcatcgtgatggcgcttactaa

SEQ ID NO: 247 - DNA, 1074 bp, Kosakonia cowanii
  source 1..1074: mol_type = genomic DNA
atggatttttatacattctcctcaagggaaatattgtcggtggacaaaagtaactggttcggaatagtgaaaaaccagttctcattttattttgcgttttatattttaagctttccgctaacttacttactattctattttggttttctttctcaagagtatatcgtttggttttatttgatactggtggctgagcacctgtctcaagaatccatgcgattacttgtggtgctagacaaggcatttaaagccaacttatcactatttattcgttccgggatatgggtttatatcgcggttgttgtcatgttctttgatattgatttgcgtcaggtatcagtaattttgatactttggctaataggatcaagcgcctctgtaatacttattatacctgatctcatccagctgaggcgaagtgccataggatcacgtaatattgatcttggctggatgtggaaaggtgtgaaagttgctgtaccactgctagttgggactctggccttgcgctcgctctatatcgttgaccgctattcattaagttattttagtgattattcagccgttggtatttattcattttactcgagttttgcaaatgctctgctagcattcgttgatgccgttgtcgttatgcaactttatccgaaaatagtgagcgcggtgaagcaaagtgatgcggtaaatcttagggtgtataaaaagaaattcattacatcagtggcgttcttgagcttggttctttttattactttgccagttggtgtatgcgttttattaaaatggatgaataaacctgaatatttttcctatttctcagtgctggctattttaatggcggcatgtgtgatctactgtttcgcccttttaccacactacgagctttatgcgcgtaatgaagatagaaaaataattttctcttcgctgtgggctgcggtcgttggcgcaatcgcaatgcctgctggcgcatattattatggcgtatatggcgtcgccgcaggtcaattattggctgtgattttcttatgtttttacaaagttatcctgttgaggaagagtaagctgaatgtttaa

SEQ ID NO: 248 - DNA, 1113 bp, Kosakonia cowanii
  source 1..1113: mol_type = genomic DNA
atgcacaaattggtagccatgtacctgcctcaattccatccggtcaagcgaaataatgaatggtggggtgagggtttcacggagtggcgtaatgttgttaaagcaaaaccgcgttttcccggacaccatcaaccgcagttaccggccgatttaggctattatgatctccgccttgcagagacgcgcaatcatcaggcaaagatggccaaagagcatgggattcatggtttttgctattatcactattggttcaatggtgaattattgcttgagcagcctgttgaagcaatgctgaattcacaggatcccgattttcctttttgcctttgctgggcaaacgaaaactggacccgtgcgtgggatgggatggaacgtgaagtgttaatcaagcaggattatactgctgatgatgcaatggctcatatgagatatctcgcgccgtattttaaagataagcgccacattcgcgttggcgacaagcccgtcttcttgatttatcgagtagataatattcccgagccgaaaaactacattcaatcattgcgcaattatgcagcagaaaatggtgttcccgcccttcacttggtggcagtcaaaaatggctttgtagagttgccggacgcagaaatattatcgcttggttttgatgccatcatggattttcagccaaatcgtgctgatttccctaagcaaaataaatcctcatcccagcaactcgtcgatatcgcgcgcaatgtgctgccagcctcggtttatcaggcccttaaaggtaacgtttcagcggtcaatcgaatcgactacaaacagctggtagcagaaaaaaccgcacaggtatggccaaaagattacgtgaagtatcctgctgtattcccctcatgggacaataccgctcgccgcaaaacgcctacggttatacaaaacaacgatcctgccgattatcagaaatggctggagtacgcgattgtgtcaaccagctcttatgacgacgatcagcagttcgtgttcattaacgcctggaacgagtgggcggaagggtgccatcttgaaccagatgagaagatgggtaaaacattcctggatgtcaccaaaaaagttatcgaaagacactcttaa

SEQ ID NO: 249 - DNA, 930 bp, Kosakonia cowanii
  source 1..930: mol_type = genomic DNA
atgtttaaaaatatttgcgtcattgttcctacgtgcaatggcggagctatatggaaacaagctgcatcagaactatcgaaactgcaaagtgagcatgtaaaagttgtcgctatcgattctgaatctactgattcaacccggcaaattgcggtcgattatggctttgatgttcttgatgtgaaaagaagcaattttaatcatggcggcacacgcaatttagcagcgcaatattgcattgaaaaactcaatgccggcctgcttatcttcctgacgcaggatgctattttgcaatctgccgaaacagtaattgcagaaataactaaagcattctcagccgatccaaaactttcagcgctgtatgggcgtcagttaccacatgataacgcgaatgcaattgcacagcacgccagatattataattataaaaacagcggatataaagcaacgcctgagaatcataaagcgatgggcttaaaagccgtcttcttatctaattctttcgctgtctatagcgttgatatttttatacagcttaacggatttcctgagaacactattctctgtgaggatatgttctacgctgcaaaatccattcaaaatggttttgctattgcatactgcccagatgtagctgtgaagcactcacataattactctcctgttgatgagtttaaacgctattttgatatcggtgttttccatgctgaagaaccctggattggaaaatacttcggaggggcgagtggggaaggtaaaaattttctaatctctgaatttaaatttttgcttaagaataaacctttgctaatgctgaacgcttcggtaaataatgccatgaaaatactaggttataagattggtaaaaattataaaaaacttcctgcgtcactgtgcaaaaagcttagcatgcataaagcatattggaaataa

SEQ ID NO: 250 - DNA, 828 bp, Kosakonia cowanii
  source 1..828: mol_type = genomic DNA
ggccaggccaacatcatctcgccggggatcgaggttgcgctgtgcgcctctggcgacctgcacgtcgagaaggcggactggctggcgcgcctgcccctgcgccagatcttcgtcgtccacgacgcctcgacgctccaggtcctcaatccgcagctgcgggccatgggtggattgctcgggctcgagctatgcagcgccatccacaggccgcgcaatctgcgcctgaagcggatgctcgatctgatcgtcgcggttccgatcgcacttgcggccgtgccggtggtcgcgctgctcgcgctcgcggtgaaggcggtcgacaacgggccggccttctacgcccagccgcggatcggccgtaacggccacgtcttcaaggtctacaagctgcgcagcatgtatgccgatgccgaggcgcggctcgccgcgcatctggaggccgacagcgcggcacggcaggaatgggagcgcttcttcaagctctcggacgatccgcggatcctgccgaggatagggcagttcatccgccactccagcctcgacgagctgccgcagctctggaacgtcctgcgcggcgatatgagcatcgtcggaccgcgaccgttcccggcctatcacaatcaatgcttcgacaccgccttccaggcgctgcggaccagcgtgccgcccggtctgaccggtctctggcaggtgacggatcgcagcgacggtgacctcgcggtccagaagcgccaggacagtttctacatccacaactggtcgttctggctcgatttctacgtcctgctgcagaccgttcccgccgttctccacgggcggggcgcgaaatag

SEQ ID NO: 251 - DNA, 1386 bp, Kosakonia cowanii
  source 1..1386: mol_type = genomic DNA
atggcaattgttgacacaattaatgtgatattaccttttttcttatcgttaggaataattgattatattacaagtaacctgccaagatttattcctcagcgagagtttgacgaccgcgtaattacgcatatctctcttagcttgatttgtaccgcatggttttggttaagactaaggcattactcatatcgcaaacctttttggtttgagctaaaagaaatcctgcgcacactggctatctttgccattattgagctgtccgtaatcgccttttcaaaatggcaatcttcccgctatctatgggttcttacctggacactgacgatgcttatggtgccaattggacgcaccgtggctcgtcgtattctggatcgcttcggctactggaaaaaaacaaccattatcgtcggcactggtaaaaatgcagttgatgcatgcagcgcattacgcagtgaagaaagcctgggttttgacgtccagtacatgttcggaacttcacctggttatgccaataaaactgaaggtgtgacctttattaccgatgaagcatggctcatttcgcacttcaaagataaagttgcgcagtttgttattgccgtcgagtccgacgagaccgatgttcgagactattggttaaaaacgctttcaattaatggttttcgccatgtatcggtgattcctacgacacgaggcttgcccctatatggcaccgatatggcatttcttttcagtcatgaggtgatgatattccgggttaacaataacctggcaaaacgcacctctcgtttcgttaagcgcacattcgacattatctgttctctgctcatcattctgatcagctccccgttgatgatctacctatggtacaaagtgacacgcgacggtgggccggcgatctatggccatatgcgggtagggcgccacggcaagcttttcccatgctataaatttcgttcaatggtaatgaattctcaggaagtgctacagcaactgttgagtaccgacccggaagcaagggctgagtgggaacgggatttcaaactaaagaacgatccgcgtattacacctgttggccgttttattcgccgcacgagccttgatgaattaccacaattattcaatgtgcttagaggtcaaatgagccttgtaggtccacgaccaatcatctccgaagaacttagtcgttatgacgaaaatgttgattattatttgatggctaagccaggtatgaccggtttgtggcaggtaagcggacgtaatgacgtcgattacgatacgcgcgtctattttgattcctggtatgtaaaaaactggtcgctgtggaacgacatcgctattttgtttaaaaccatcaaagttgttttgcatcgtgatggcgcttactaa

SEQ ID NO: 252 - DNA, 1035 bp, Kosakonia cowanii
  source 1..1035: mol_type = genomic DNA
gtggacaaaagtaactggttcggaatagtgaaaaaccagttctcattttattttgcgttttatattttaagctttccgctaacttacttactattctattttggttttctttctcaagagtatatcgtttggttttatttgatactggtggctgagcacctgtctcaagaatccatgcgattacttgtggtgctagacaaggcatttaaagccaacttatcactatttattcgttccgggatatgggtttatatcgcggttgttgtcatgttctttgatattgatttgcgtcaggtatcagtaattttgatactttggctaataggatcaagcgcctctgtaatacttattatacctgatctcatccagctgaggcgaagtgccataggatcacgtaatattgatcttggctggatgtggaaaggtgtgaaagttgctgtaccactgctagttgggactctggccttgcgctcgctctatatcgttgaccgctattcattaagttattttagtgattattcagccgttggtatttattcattttactcgagttttgcaaatgctctgctagcattcgttgatgccgttgtcgttatgcaactttatccgaaaatagtgagcgcggtgaagcaaagtgatgcggtaaatcttagggtgtataaaaagaaattcattacatcagtggcgttcttgagcttggttctttttattactttgccagttggtgtatgcgttttattaaaatggatgaataaacctgaatatttttcctatttctcagtgctggctattttaatggcggcatgtgtgatctactgtttcgcccttttaccacactacgagctttatgcgcgtaatgaagatagaaaaataattttctcttcgctgtgggctgcggtcgttggcgcaatcgcaatgcctgctggcgcatattattatggcgtatatggcgtcgccgcaggtcaattattggctgtgattttcttatgtttttacaaagttatcctgttgaggaagagtaagctgaatgtttaa

SEQ ID NO: 253 - DNA, 1113 bp, Kosakonia cowanii
  source 1..1113: mol_type = genomic DNA
atgaaaaaattaatagccatgtacctgcctcaattccatccggtcaagcgaaataatgaatggtggggtgagggtttcacggagtggcgtaatgttgttaaagcaaaaccgcgttttcctgggcaccatcaaccgcagttaccggccgatttaggctattatgatctccgccttgcagagacgcgcaatcatcaggcaaagatggccaaagagcatgggattcatggtttttgctattatcactattggttcaatggtgaattattgcttgagcagcctgttgaagcaatgctgaattcacaggatcccgattttcctttttgcctttgctgggcaaacgaaaactggacccgtgcgtgggatgggatggaacgtgaagtgttaatcaagcaggattatactgctgatgatgcaatggctcatatgagatatctcgcgccgtattttaaagataagcgccacattcgcgttggcgacaagcccgtcttcttgatttatcgagtagataatattcccgagccgaaaaactacattcaatcattgcgcaattatgcagcagaaaatggtgttcccgcccttcacttggtggcagtcaaaaatggctttgtagagttgccggacgcagaaatattatcgcttggttttgatgccatcatggattttcagccaaatcgtgctgatttccctaagcaaaataaatcctcatcccagcaactcgtcgatatcgcgcgcaatgtgctgccagcctcggtttatcaggcccttaaaggtaacgtttcagcggtcaatcgaatcgactacaaacagctggtagcagaaaaaaccgcacaggtatggccaaaagattacgtgaagtatcctgctgtattcccctcatgggacaataccgctcgccgcaaaacgcctacggttatacaaaacaacgatcctgccgattatcagaaatggctggagtacgcgattgtgtcaaccagctcttatgacgacgatcagcagttcgtgttcattaacgcctggaacgagtgggcggaagggtgccatcttgaaccagatgagaagatgggtaaaacattcctggatgtcaccaaaaaagttatcgaaagacactcttaa

SEQ ID NO: 254 - DNA, 693 bp, Kosakonia cowanii
  source 1..693: mol_type = genomic DNA
atgacgggtcatatagcaatcatccctgcccgaggaggcagcaaacgtcttcctggtaaaaacatcaaattgctcaacggcaagcctttaatccagtggagcgttgaagcagctttgcagtcgaaattattcgatcgcatcattgtcagcacagacgctattgagattaaagacgccgcggagcgtgctggcgcggaggtgccttacctgcgctcagcggagctttcctccgatactgcaaccactgacgatgtcgtacaagacgtcgtgcaatggctggagacgcagggtactgaagtctcaacggtgacaattttacagcccacatcaccattacgtacggcaaagaatatcattgatgcttttgcattaatgcaagaaaagcaggccagggctattatttcagtatgtccgctcgaacacccgattcagtattgcaatgcgctccccgacgatctctcgcttgataaatttatcgatgttgctaatttaaaacgtacacaagatcttcctccattttatcgtttaaatggtgcgatatacctttttcagcgcgattatgtctctcatttccgtaatatatatagtaaggggacatatgcatatgtcatgtcgaaaagccagtctgttgatattgacgaggagatcgactttgaatttgcacaattattaatggctaaacgatctgattag

SEQ ID NO: 255 - DNA, 1077 bp, Kosakonia cowanii
  source 1..1077: mol_type = genomic DNA
atgacccttattattgcagaagcaggtgtgaatcataatggtcagcgagatctggcttttaaacttgtggatgccgctcaccgggccggcgcggatatcgtcaaatttcaaacattcaaatcaaaaagtttagtgactgaaagtgctgctcaggccgagtatcaaattacaaataccaataaaaccgaatcgcagcttgcgatgctcagtcgtttagagctttcttatgaaacgcatcgggaattaatcgaatactgcaacgatcttggcattgagtttttatcaacggcattcgatgaagagagcctgaactttctcgtttccgatttagggctgaaaaaactcaaagtaccatctggtgaacttaccaacgcgccattcgtgctggcccatgctttgacgggatgcgacatcatgctctcaacgggcatggcttcacttgctgaaatagaagatgcactcggcgttatcgcttttggctataccaccaatggcaatataacgccgtctaaagctgaatttgaaaaggcttacgcctccgaagcgggccagcaggcactgaagtctaaggtacgtattctgcattgcaccacggaatacccggcaccaatgaaggagatcaatctgcgggcaatggatgctatttcagtcgcctttggtttaccaaccggttattcggatcacagtgaaggtattgctattcctgttgctgctgtggcacgtggagcggtaatcattgaaaagcattttacgctagacaaaaacatggagggtccggatcacaaagcctcactggagcctgatgagctgactgaaatgatcaaatcgatccgcaatgtcgaactcgctctcggtgacggtgtgaaacgtcctacaccctctgaacagaaaaataagactatcgcgcgcagaagcatagtcgctgctaccactatcagcaaaggcagcgtatttagcgaagataacctcgccatcaaacgtccaggtgacgggatgtctccatacagctattgggatctgctgggcaaagtagcgggtaagaattatggcgaaggcgataaaatcagcaatgactaa

SEQ ID NO: 256 - DNA, 999 bp, Kosakonia cowanii
  source 1..999: mol_type = genomic DNA
atgtttaatgataaagtaattcttgtaactggcggtactgggtcgtttggtaataaatttgttcgcatgacgcttgagaaatataatccgaaaaaaatcatcatttattctcgtgacgaaatgaagcagtgggaaatggctaaacattttaaagatgaaagccgcattcgctttttcattggtgatgttcgtgataaagagcgcctttaccgcgcgctggatggcgtcgattttgtcgtgcacgccgctgcgactaagattgtccctactgccgaatataatccatttgagtgtgtcaaaacaaatatcaatggtgcgatgaatgttattgatgcctgtattgataaaggcattgaacgtgtggttgccctttcaacagataaagcaagtagcccggccaatctttatggtgccactaaactggcttccgacaagctgtttgttgccggaaactcctactctggcgcgtataaaactcgcttcgccgttgtgcgttacggtaacgtaatgggatcacgcggttccgtaattcctttcttcctctcaatcaaagaaaaaggcgaattacctattactgacgatcgtatgactcgctttatgatcaccctggagcaaggggttgaattagtttggcatgctttccaggacatggttggcggcgagatttatgtgaaaaagatcccctctatgaaagtgactgatgttgcgtcagctgtcgcacccgaagctacgcagaaagttgtcggtattcgtccgggtgaaaaattgcatgagcagatgatcagtgcagaagatgcccattacacctatgaatacccggagcactttaaaattcttcctgctattcacaactggtgcgattcgcctgaacgtattaaagatggcaaacgcgtgccggaaggctttgtttatgaaagcgacagcaatacagaatggatgagcgttgaagagctgcgtcagtggatcgaagtgaaccgcgataaagtaggcaacatctga

SEQ ID NO: 257 - DNA, 1152 bp, Kosakonia cowanii
  source 1..1152: mol_type = genomic DNA
atgaaatttattccctatgggcggcaggatatttcacatgaggatattcaggccgtcgttgatgtattgcagtctgacttcctaactcaggggccctgtgtccctcagtttgaacaagcaatcgcgaattatgttggtgtaaaacacgcgcttgccgtcaacagcgcaacctcagccctccacattgcctgtatggcactgggggtaaaagagggcgactggttgtggacgacgccgaacacgtttgttgcatctgccaactgcgcacgctattgcaatgcaaatgttagcttcgttgatattgatcccgcgacctataacatgagcgtttccgctctggaaactaagctgcgcaaagcaaaagcagaaggcacattacctaaagttttggtacctgttgcatttgcgggacaatcctgcgagatggaagcgatacacacgcttgcacgcgaatatggttttgccattatagaagatgcttcgcatgctattggcggcaagtatcagggcgaacaaatcggtaattcaaaatatgccgatatcactattctcagttttcacccggtcaaaatcatcactaccgctgaaggcggaatggcgttaaccaataatgatgagctggctgaaaaactggcgttgctgcgtagccacggtatcacccgtgatgcggacaaaatgacaaaagaggcagaaggcggctggtattatcagcaggtagatctgggccttaattaccgcatgaccgaactgcaagctgcgctcggcgtgagccagttaaatcgtattgatgagttcgtggctgcacgccaccgtttagcgaagcgttacgacgcgcagcttgctggcgtacctgtgacgcttcctcatcaggcggagagcggttatagcgcactgcacctctacccgataatggttaacgatcctgcaaaacgtaaaccgctattcgatcacctgcgtgaaaaaggcatcggtgtgaacgtacattatattccagtacatacacagccttattatcagcagctaggccataaagtcggtgattatcctgtatctgaagagtattactctcgtgcgatcagcattccgatgtactcgactctatcggaagaagaacaggatttcgttattaaatgtattcgggagtttttctaa

SEQ ID NO: 258 - DNA, 711 bp, Kosakonia cowanii
  source 1..711: mol_type = genomic DNA
atgaacgtggcaatcattcctgcgcgtggtggtagtaagcgcataccgcgaaaaaatatcaaaacgttttgtgggaaaccaatgattgcctggtcaattgaagccgctcagaagagcggcgtttttgaccgcatcatcgtgtcgacggatgatgaagagatcgcgacagtagcgaaatgctttggagcagaagtaccttttgtacgaccagaagagctgtcaaatgattatgccggcacaatccctgtcattcgacacgcaacctgttggcttaaagaacagggttataacgttacaaacgtttgttgtatctatgctaccgctcctttcattacgcatgatgatattatccgcgggctggatacgctggaaaaccataccgcagattatgctttcaccgtcacccgtttcccataccctattcagcgggcgctgaaaatcgaccagtataacaaaataggcatgttcaatccggagatgttccatgttcgatctcaggatttggaagagtcatggcatgatgcagggcagttttactgggggactcgtatggcctgggagcaagaaaaaccgattttcacatcagactcttaccccgtcattcttccagctgagcgtgtacaagatattgatacacccgaggactggcgcgtagctgagtggttgtacaaagccatggaatttaagaatgaacatttttctgcgggttga

SEQ ID NO: 259 - DNA, 1527 bp, Kosakonia cowanii
  source 1..1527: mol_type = genomic DNA
atgaacatttttctgcgggttgactcttctttatcaattggtacgggccatgttgtcaggtgtctaaatttggcaaatgcgctgcgtaataccggtgcaaaatgtcattttatttctaagcagcatactggcaacgttattcctaaaattcattgccatggcttcagcgtcagtattattccgggagcaccagaaccagagaattacattgttgatgaaaagtcatggcttaatgctactcaagcacaagacgccagcgattttatttcgctggtcgaacaggcatcggtaaaacctgacgtcattatcgtggatcactactcaatagattatgagtgggaatatagtgttaaaaagcagtatcccttggtccgcttagtagtgattgatgatctatgtaaccgaccgcattacgctgatgtcatcattgatcaaacgttcaagcgcacacctgaagagtacggtgcgctaaacaaagcgaatgggcagatattttcaggcacatcatacgcactcatcaatcctgctttcgttgcattaagcgcaaaatcgattaaaagaaaaaaagcgctacaagatccgaaatcagtgttgatcaccatgggaggcgtcgatgcacaaaacgtgacagagatgatacttacctggttgaatgaaaatgagatcatctttttcgaaaaaatcaccatcgtaatgggacgcgcgtcaccgcatcaatctgcggtgcgtgaggctgcgaaacacgcgcgtttacctgttgaggtgcttgtcgatgtcgataccatgcctgaactcatgcttgagcatgatcttgctattggagcgttgggtggaacgacatgggagcgttgtgttatgggattgcctgcagtaaacatcgcgatagcggataaccaaatgaccatcgcggagtcgttacgcagcagtggcgctattgttttatacgcaaactcgcttcaaccccagacctttacgtcggcactgatcgacctgataacgcattacaaagaacatatgctgttggctatggatatttgtgatgggcatggcatgtcgcgagtcgtacaaaacattcttccgcagcctgccagagaggggaaaaatgtgatgctaagacctgcgacaaaaagtgatatcgattttgtttataaattacagtgcgagccgcaaaccagaaagtttgccagaactcctgaaattcccgcttatgacgagcatgttgcatggatgaagcgcaaactcaacgacgagcgggtaaagttctacattattgagtgcgaaattccttgcggagtattacgactcgatcctattcagcatagcggtgcagattttgaaatatccattttcatgactgaaaaaagtcaggggaagggcattgcaagtgccgctattaagcgagccatgatgctaaacaatgacgtcaaaatgcttgcaacagtgctggcagaaaataccgcatcgcacctgctatttcaacgattaggttttactaaaatttccaatagcgaatacttaagtgagtga

SEQ ID NO: 260 - DNA, 1050 bp, Kosakonia cowanii
  source 1..1050: mol_type = genomic DNA
atgaataattttatcactatcaatggacgcaaaatcggcaaagactattcgccatatatcatcgcagaactttcggccaaccataatggcgatatcaatcgtgcatacaaaatcatggaagaagccaaagccgcaggcgcagatgcaatcaaattacaaacctatcgcgcagataccattacgattgaccatgatagtgaagatttccagatccatggtggattgtgggatgggcaaacgttattcaatctctataaaggcgcgcaaatgccgtgggaatggcatgagccgctttttgcaaaagcgaaagaactgggcatcaccatttttagtagcccgtttgattttaccgctgttgatctgttggaaaaattagatgcaccggcctataaaatcgcctcatttgaggctattgacctgccattaattaagtatgtcgccaagacaggcaagccgatgattatttcgaccggcatggccgatgagacagaaattcaggaagccatcgacgctgcttatgaaggcggttgtagggaattggtggttttacattgcgtaagtggctatccggctcccgcggcagattataatctcgccactattccggatatggcgcagcggtttaatgtgattcctggcctgtctgaccataccatcgataacactaccgctattgcagctgttgtattaggtgccagcgtcattgagaaacatgttactcttgatcgtaatggtgggggccctgacgatagtttttcactagagcctccagaactgcacgctttatgtcgcgatgcgaaaactgcatggcaagcgcttggtcgtgttaattacgagcgtaaggagagcgaaaaggggaatgcgaaattccgtcgatctctctatgtcgtcaaagacattaaaaaaggtgaactgttcactacagaaaatattaaaagtatacgtccaggtttcggtgttgcgcctaaattttatgatcattttattggtaaagtagcaacttgtgacattaaacgtggtgagccactgaaattcgattttatcgaatag

SEQ ID NO: 261 - DNA, 1161 bp, Kosakonia cowanii
  source 1..1161: mol_type = genomic DNA
atgtcgaactttgatgatctttatgcctatgttgaagaaagagatttaagagatagaaattttaaaaacaatattagaagtttatatctgaaaaacgcaaaatggatatttccgtttaatgatgttctttcttcaatattttttttctggttacgtccagttaagaaaaagaaatacttctttcttgggacaagatttaagcatcttatctctgcccttccagtagaggaagtttgtatcattggcggtccaaagcagttattgtattgccttagaaataatatccactatattccaaatggagtgttttggaaattattgagtaaaggctttattgtcaataatttcagtaaaataaaacaaactgcatacaaacagagtaaactgctcgggaaaatacgtcacgatacccagcaagcactaatgatcgttgaaaatgactcgcttcctattcaacgcttatattgtaatatagcagcagaatcaaatattaaaacggtttgtattcagcatggcctctttcagtcaaaaacagaccctaaaaccatcgatggttggaaatgcgattacttcatttgttacgatgacaaacaaaaagaagtgctttcaggtttaggtatagatcgtcataaagtgatgataggtggattctatgaacctattattcaagtgaagacatattccaaaaaccctccattcaaagtttgttttttagggcagccatggtttaagtatggggatgtttataaaaataaatatcagcacattgttaatgttcttagtacctctcttcgcgagcctgaaagtcatttttactttaagcctcatccttgggaaaaggatgctgagtatcttaaaaatatgagcaatgtttttatgggaagtatgcaagaggctatcgaaagctacgatgtttttttctcttttacctcaactgctttgctagaagttacgatggcgggaaaagtcgcaatacaaatttatgacgacttatttgcttgtgataactttgaaacgctcggctatgcttactctgtcaaaagtgatgagttgaaggaaaatattcccgctttgctacgacacacgccgtatccattagaattaccgtcctttgaccacttggttaaccaaattaaattattaactaaggtgatactgtga

SEQ ID NO: 262 - DNA, 1407 bp, Kosakonia cowanii
  source 1..1407: mol_type = genomic DNA
gtgagtgaaaattcgggaaaacaatttaactcgatattcataataatattatctttaacatgtgttatagctgcaagtgtaagttcagacttatttattgttgcaggtagtattagtctggctttattctttgctttttgtataactatttataaaaagcagcagtactttttctttttggtcctacctttcctttttccacaatttacagcgatagtgtcgaatttttctctcgaaaccggcgcgtttattgaagagctaaaggtaacatcatacgcaacaggtggggcaacaaggctggttttctttgtgctctcctttttctttgttgccctggtggtctttcggtttattaataagtacagagtaaatcgatttttcttcgttcttcgtggtgattattcaaaattagagcgacaattaattttttttgtagctgggctgatttttttagcgctgacgataaatgcattgatatggggtagtccactattaaaaggcgttcagcgtttcgattattggacggcacatccttatccatctttcaggaatttgctttatcagggctacttactgtcatttattcttggggtttacataaccaaatcaaaactaaccactcaacgtaaaagttggaaatatatatctttagttctatgtttttgcttttttaatattgtatatggtgagaagttcactggcgtcttcttgacactgctctatttctttgtgggcttttttggtgcgctggtactctataaaaaaattaatgtagtaactggaaaaaacattatctttgttctgattgttgggttgttgttgtatggattgatctattatcaatacaaatatatccaccaactgccagggagtatattttctttcatagaaagtcgcgtgcttaacttgcaaggcgaagtttggtgggcaatagatcgcaaagattacgacggcagtgcgctctcatatctttataaatatagcagtgattgtaccgagactggcggcctttactttctaatgtatcaaattgcacccggaagtatggtcgattcatattgtcaacgtggcataacgtttactatgggatatcctgcgatcctattaccgaccgctggttactttttagggtatgtccttaatcttctatttgctgcactggtaggcataaccctttttctcattaaaaaatctattgagtacccgaatgttatttcactattcctttcggctaaagttctgctaatagaaacgcatgcgcttaatatgggaaatatatataacattctggatgtaaaattctttgcttatttcttactgttgctcttcttttctgaattaaggttaaaaaatgcacaaattggtagccatgtacctgcctcaattccatccggtcaagcgaaataa

SEQ ID NO: 263 - DNA, 693 bp, Kosakonia cowanii
  source 1..693: mol_type = genomic DNA
atgacgggtcatatagctatcatccctgcccgaggaggcagcaaacgccttccgggaaaaaacattaaattgcttaacggcaagcctttaatccagtggagcattgaggcggctctgcagtcaaaattattcgagcgcatcattgtcagcacagacactattgagattaaagacgccgcagaacgtgctggcgcggaggtaccttacctgcgctcagcggagctctcctccgatactgcaaccactgacgatgtcgtacgagacgtcgtgcagtggctggagacgcagggagctgaagtttcaacggtgaccattttacagcccacttcaccattacgtacggcaaaaaacatcattgatgcttttgcattaatgcaggaaaagcaggccagggctattatttcagtgtgtccgatcgagcacccaattcagtactgcaatgcgctgcccgacgatctctcgcttgataattttatcgatgttgccaatttaaaacgtacacaagatcttcctcccttttatcgtttaaatggtgcgatatacctttttcagcgagattatgtcgctaatttccgcaatatatatagcaagggtacatacgcatatatcatgtccaaaagtcagtccgttgatattgatgaggagattgacttcgaatttgcacaattattgatggctaaacgaactgagtag

SEQ ID NO: 264 - DNA, 1077 bp, Kosakonia cowanii
  source 1..1077: mol_type = genomic DNA
atgacccttattattgcagaagcaggtgtgaatcataatggtcagcgagatctggctttcaagcttgtggatgccgctcaccaagccggcgcagatatcgtcaaatttcaaacattcaaatcaaaaagtttagtgactgaaagtgctgctcaggctgagtatcaaattaccaataccaataaaaccgaatctcagcttgcgatgctcagtcgtttagagctctcttatgagacgcatcgggaattaatcgactattgcaacgatcttggtatcgagtttttatcaacggcattcgatgaagagagcctgaactttctcgtttccgatttagggctgaaaaaactcaaagtaccgtctggtgaactcaccaatgcgccattcgtactggcccacgctttaaccggatgcgacatcatgctctcaacgggcatggcttcacttgctgaaatagaagatgcacttggcgttatcgcgtttggctataccgccaatggcaatataacgccgtctaaagctgaatttgaaaaggcttacgcctccgaagcgggccagcaggcactgaaatctaaggtacgtattctgcattgcaccacggaatacccggcaccaatgaaggagatcaatctgcgggcaatggatgctatttcagtcgcctttggcttaccaaccggttattcggatcacagcgaaggtattactattcctgttgctgctgcggcgcgtggcgcggtaattattgaaaagcattttacgctggacaaaaacatggaggggccggatcacaaagcttcactggagcctgatgaactgactgaaatgatcaaatcgatccgcaatgttgaactcgctctcggtgacggtgtgaaacgtcctacaccctctgaacagaaaaataaaactatcgcgcgcagaagcatagtcgctgctactactatcagcaaaggcagcgtatttagcgaagataacctcgccatcaagcgtccaggcgacgggttgtctccgtacagctattgggatctgctgggcaaagcggcgggtaaagattatggcgaaggggataaaatcagcaatgactaa

SEQ ID NO: 265 - DNA, 1077 bp, Kosakonia cowanii
  source 1..1077: mol_type = genomic DNA
atgacccttattattgcagaagcaggtgtgaatcataatggtcagcgagatctggcttttaaacttgtggatgccgctcaccgggccggcgcggatatcgtcaaatttcaaacattcaaatcaaaaagtttagtgactgaaagtgctgctcaggccgagtatcaaattacaaataccaataaaaccgaatcgcagcttgcgatgctcagtcgtttagagctttcttatgaaacgcatcgggaattaatcgaatactgcaacgatcttggcattgagtttttatcaacggcattcgatgaagagagcctgaagtttctcgtttccgatttagggctgaaaaaactcaaagtaccatctggtgaacttaccaacgcgccattcgtgctggcccatgctttgacgggatgcgacatcatgctctcaacgggcatggcttcacttgctgaaatagaagatgcactcggcgttatcgcttttggctataccaccaatggcaatataacgccatctaaagctgaatttgaaaaggcttacgcctccgaagcgggccagcaggcactgaagtctaaggtacgtattctgcattgcaccacggaatacccggcaccaatgaaggagatcaatctgcgggcaatggatgctatttcagtcgcctttggtttaccaaccggttattcggatcacagtgaaggtattgctattcctgttgctgctgtggcacgtggagcggtaatcattgaaaagcattttacgctagacaaaaacatggagggtccggatcacaaagcctcactggagcctgatgagctgactgaaatgatcaaatcgatccgcaatgtcgaactcgctctcggtgacggtgtgaaacgtcctacaccctctgaacagaaaaataagactatcgcgcgcagaagcatagtcgctgctaccactatcagcaaaggcagcgtatttagcgaagataacctcgccatcaaacgtccaggtgacgggatgtctccatacagctattgggatctgctgggcaaagtagcgggtaagaattatggcgaaggcgataaaatcagcaatgactaa

SEQ ID NO: 266 - DNA, 240 bp, Kosakonia cowanii
  source 1..240: mol_type = genomic DNA
atgttccacgccgagcacttcaacactcgctcccaggatctggaggagagctaccacgacgccgggcaattctattgggggctggcaagtgcttggctggctgggcatgtgattttcagcccagcgtccagcgccgtggtgctgccgcgccaccgcgtgcaagacatcgataccccagaagattgggttcgtgctgaatggatgtataaagcctttcaagcggaaagcgccaaagcatga

SEQ ID NO: 267 - DNA, 1071 bp, Kosakonia cowanii
  source 1..1071: mol_type = genomic DNA
atgaataaatttatttctatcgatggtcgaaaaatcggatctgacttccctccttatataattgcggagatgtcggcgaatcataatggtaataaagattctgcttttaggattattgaagaggcaaaaaaatctggcgcagatgccgtgaaaattcaaacctaccgccctgatacaattacacttaattctgatggaccggactttcagattaagggcggtctatgggacggtaaaacactttatcagctttacgaatgggctcatacgccttgggaatggcatcgtccaatgtttgattatgcccgaaagctgaatataactatgtttagctcgccgtttgactccactgctgtagatctattcgaagatctaaatgcacctgcttataaaatagcctcttttgaggctgttgatttagctttgattaagtacgtggccgctactggtaaaccaatgatcatttcaacagggatggcggacgcggatgaaatagccgaggctgttgaggccgcgcgggagggcggctgtgaagagttggctattcttcactgtgttagtggttatccagctccggcagaagattataatctacggacgataccagacatgatcaaccgccatggtttggtaacagggttatccgaccatacgttagacaacacaacggcgattgcaagcgttgcactgggggcggcgattatcgagaaacactttacccttgatcgcagcggcggcggtcctgatgacagtttttcactcgagcctgcggagcttgtagcgctctgtcgggatagcaaaacggcatgggcggctttaggcaatattaattacggtcgtaaatccagtgaacaagggaacgtgcagttcagacgttccttgtattttgttagaaccctaaagaagggcgaggtaattacgagcgacagtatacgtagcgttcgccccggttttggcttggctccaaaatatttaagcagtattgtcggaagaaaagttaagtgtgatatcgaggctaactctcctgtgcttataaatttaattgcagagcctgataatcgaataatttga

SEQ ID NO: 268 - DNA, 677 bp, Kosakonia cowanii
  source 1..677: mol_type = genomic DNA
gttgactacgtcgtgcacgcagctgctaccaagatcgtaccgacagcggaatacaaccctttcgagtgcatcaaaaccaatatcaacggcgccatgaacctgatcgacgcctgtatcgataagggcatcaagcgtgttgtcgcgttgtccaccgacaaggccagtagcccgatcaacctgtacggtgctaccaagttggcgtccgataaattattcgttgccggtaattcatatgcaggcggccacgaaactcgcatggccgtcgtgcgttatggcaacgtcatgggctcgcgcggctcggtcatcccctttttcatgtccatcaaggacaagggcgagctaccgattaccgatgagcgcatgactcgcttcatgatctcgctggaggaaggggtcgagttggtttggcacgctttcgaggatatggaaggcggcgaaatttacgtaaaaaaaatcccttcgatgaaggtgacggacctcgcccgcgtggtcgccccggacgccaagcaaaagatcgtcggcatccgcccgggggaaaagctgcacgagcagatgatcagcgccgaggactcctattacacctacgaatatcccgagcatttcaagatcctgccggtcatcaacgactgggcgacctgcccgaaacgtatcaaggacggcaagaaagtcgcggaagg

SEQ ID NO: 269 - DNA, 761 bp, Kosakonia cowanii
  source 1..761: mol_type = genomic DNA
aaaaagtagcagttaggtacagccgtaaactaatggtgatagatgacctagcggaccgtgctcatctatgcgatctgttgcttgatcaaaacttagggcgactaccattagattacaaattttatgttccatccgattgtgagttattaatcgggcccaggtacgcgctgttacgaaaagattttgcagagctgcgcaatgaaagtttaagccgtagagcgtcgtcctctctcaaaaatataatcataactatggggggggtagatgaaaaaaacgtaaccagtcgtattatgctggctttaagtgctttaaatttacgctcaagtataaacatcacggttgtgatgggggggacttcgccttggttgaaaaatgttaaagatctggccgcgacgatgccctatccgacaaaagttttgagtaatatcgataatatggctgaagtaatgttggtcagtgacttggcaattggcgcagcaggtagcacatcatgggaaaggtgctgtttaggactaccttctctatttgtgattctcgctgctaaccagatggggatcggcaaggcgttgcaagatagtggaagtgctatctccttgggcagtcctgaaagtccttcgtttaatgagaaaattactaactcagtcaacgccttgctgcaagatccatcgctcttggagcgactgagcgctgcggcagctacagtcacagatggagcgggatgcgcagcgcttgtgtcgtggcttgggaaagcgcaaaaatga

SEQ ID NO: 270 - DNA, 1035 bp, Kosakonia cowanii
  source 1..1035: mol_type = genomic DNA
atgtttaagaataaagtattgttgattactggtggtactggttcttttggtaatgcggtgctgcgaagatttctcgaaactgatattgctgagatccgtattttcagccgagatgaaaaaaaacaagatgacatgcggaagaaatataatagcaataagctgaagttctacatcggtgacgttcgcgattacaacagtattagcaacgctacacgcggtgttgattttatctatcatgcggcagcgcttaaacaagtaccttcctgtgagttccatccgatggaggccgttaaaactaacgtcctcggcacagaaaacgtacttgaagccgctattaacaatgaagtgaaacgtgttgtttgcctcagtactgacaaagcggtctaccctatcaacgctatgggtatctccaaggcaatgatggagaaagtgatggtcgctaaatcccgaaatgtgaacagcgcaaaaacggtgatttgcggtacgcgttatggcaacgttatggcttctcgtggttcggtaattcctctgtttgttgacctgattaaagcgggcaaagcgctgaccataaccgatccgaacatgacgcgttttatgatgacgctggaagatgctgttgatctggtgctttatgcctttgagcacggtaacaatggcgacatttttgtccagaaagcgcctgcagcaacgattgaaaccttggctattgcgctgaaagagctgttgaatgttaacgatcatccgatcaacgttattggtactcgccatggcgaaaaactttacgaagcgctgctgagccgtgaagagatgatcgcctccatcgatatgggtgattactaccgtgtaccgcccgatctgcgtgacctgaactacggaaaatacgtagaacaaggtgatacccgtatctctgtggtggacgattataactctcacaatacacagcgactcgatgtcgaaggcatgaaaacgctgctgctgaagctgccgtttatccgtgcactgcgtgatggtaaaaactacgagctggatgcctga

SEQ ID NO: 271 - DNA, 359 bp, Kosakonia cowanii
  source 1..359: mol_type = genomic DNA
atgacccccgagacgacgaacacgacgacgaacacggcagcgagcacgatgccggcgaccgtgcagggcgccgcgaccaggaccgtcgcgatcatccccgcccgcggcggatcccagggagtgccgcgcaagaacgtgcggcgggtcggtggcgtgccgctcgtcgaacgcgcggtgcgcagtgcgctcgcatccggtcgtgtcgacctggtcgtggtgtcgaccgacgacgatgagatcgcggcggtcggagcgtccgccggagcgcggatcgtgcgccgaccggccgctctctccggcgacacggcctcgtcggagagtgcgatcctgcacgccctcgacgagctcgatcgggcggg

SEQ ID NO: 272 - DNA, 711 bp, Kosakonia cowanii
  source 1..711: mol_type = genomic DNA
atgaacgtggcaatcatccctgcgcgtggtggtagcaagcgcataccgcgaaaaaatattaaagagttttgtggtaaacctatgattgcctggtcaattgaagccgctctaaagagcggcgtttttgaccacgttatcgtgtcgacagatgacgaagaaatagctgacgtggcgcaaaactatggtgcagaagtaccttttgtacgaccagcagagctgtcgaatgattatgctggcacgatccccgtcattcggcatgccactgtttggcttgttgagcaggggtatgacgtgcagaacgtttgttgcatctatgctaccgctccttttattacgcatgacgatattattcgtgggcttgaaatccttaaaagccatgaggctgattacgcttttacggtcacacggtttccttatcctatccagcgagcgctgaaaataaaccagcatgacaaaatcggcatgttcaatcccgagatgttccatgttcgctcccaggatttagaagagtcatggcacgatgccgggcagttgtattggggtactcgcgaagcgtgggagcaggaaaaaccgattttcacctctaacgcctatccagtgatccttcccgcggagcgtgtacaagatattgatacaccagaggactggcgagtagcggagtggttgttcaaagccatggaattcaagaatgaacatttttctgcgagttga

SEQ ID NO: 273 - DNA, 1050 bp, Kosakonia cowanii
  source 1..1050: mol_type = genomic DNA
atgaataattttatcactatcaatggacgcaaaatcggcaaagactattcgccatatatcatcgcagaactttcggccaaccataatggcgatatcaatcgtgcatataaaatcatggaagaagccaaagccgcaggcgcagatgcaatcaaattacaaacctatcgcgctgataccattacgattgaccatgatagtgaagatttccagatccatggtggattgtgggatgggcaaacgttattcaatctctataaaggcgcgcaaatgccgtgggaatggcatgagccgctttttgcaaaagcgaaagaactgggcatcaccatttttagtagcccgtttgattttaccgctgttgatctcttggaaaaattagatgcaccggcctataaaatcgcctcatttgaagctattgacctgccattaattaagtatgtcgccaaaacaggcaagccgatgattatttcgaccggcatggccgatgaggcagaaattcaggaagctatcgacgctgcttatgaaggcggttgtagggaattggtagttttacattgcgtaagtggctatccggctcccgcggcagattataatctcgccactattccggatatggcgcagcggtttaatgtgattcctggcctgtctgaccataccatcgataataccaccgctattgcagctgttgtattaggtgccagcgtgattgagaaacacgttactctcgatcgtaatggtgggggccctgacgatagtttttcactagagccttcagaactgcacgctttatgtcgcgatgcgaaaactgcatggcaagcgcttggtcgtgttaattacgagcgtaaggagagcgaaaaggggaatgcgaaattccgtcgatctctctatgtcgtcaaagacattaaaaaaggtgaactgttcactacagaaaatattaaaagtatacgtccaggtttcggtgttgcgcctaaattttatgatcattttattggtaaagtagcaacttgtgacattaaacgtggtgagccactgaaattcgattttatcgaatag

SEQ ID NO: 274 - DNA, 999 bp, Kosakonia cowanii
  source 1..999: mol_type = genomic DNA
atgtttaatgataaagtaattcttgtaactggcggtactgggtcgtttggtaataaatttgttcgcatgacgcttgaaaaatataatccgaaaaaaattatcatttactctcgtgacgaaatgaagcagtgggaaatggctaaacattttaaagatgaaagccgcattcgctttttcattggtgatgttcgtgataaagagcgcctttaccgcgcgctggatggcgtcgattttgtcgtgcacgccgctgcgactaagattgtccccactgccgaatataatccatttgagtgtgtcaaaactaatatcaatggtgcgatgaatgttattgatgcctgtattgataaaggcattgaacgtgtggttgccctttcaacagataaagcaagtagcccggccaatctttatggcgctactaaactagcttccgacaagctgtttgttgccggaaactcctactctggcgcgtataaaactcgcttcgccgttgtacgttacggtaacgtaatgggatcacgtggttccgtaattcctttctttctctcaattaaagagaaaggcgaattacctatcactgacgatcgtatgacccgctttatgatcaccctcgaacaaggggtcgagttagtgtggcatgccttccaggacatggttggcggtgagatctatgtgaaaaaaatcccatccatgaaagttacggatgttgcgacagcagtagcgccagaagcgacgcaaaaagtcgttggtattcgtcccggcgaaaagctgcatgagcaaatgatcagcgcagaagatgcgcattacacctacgaatatccggaacattttaaaatcctgcctgctattcacaactggtgcgattcacctgagcgtattaaggatggtaagcgcgtgccggaaggctttgtctatgaaagcgacagcaatacggaatggatgagcgttgaagagctgcgccagtggatcaatgtgaaccgcgataaagtaggcaatatctga

SEQ ID NO: 275 - DNA, 1527 bp, Kosakonia cowanii
  source 1..1527: mol_type = genomic DNA
atgaacatttttctgcgagttgactcctcactatcaattggtacgggtcatatcgtcagaagcctgaatctggcgaatgcgctccgtaatactggggctgaatgtcattttattaccaagcagcataccggccacatcattcccaaaatcgagtctcaggattttaatgtcagcattattccgggcgcaccagagtctgaaggttatattgttgatgaaaagtcctggcttaacggtacgcaagctcaagacgcctgcgaatttattgcactggttgagcaggcggcggtaaaacctgaggttattattgttgatcactactcactggattatgagtgggaatacgctatcaaaaagcagtatccctcggcccgaatagtggttattgacgatctgtgtaatcggcagcattgggccgatatgattattgatcaaacatttaagcgcacacctgaagagtatggggcgctaaacaaagcgaatgggcagatatattcaggcacatcatacgcactcatcaatcctgctttcgttgcattaagcgcaaaatcgattaaaagaaaaaaagcgctacaagagccgaaatcagtgttgatcaccatgggaggcgtcgacgcacaaaacgtgactgagacgatacttacctggttgaatgaaaatgagaccacctttttcgacaaaatcaccatcgtaatgggacgcgcgtcaccgcatcaatctgcggtgcgagaggctgcgaaacacgcacgtttccctgttgaggtgcttatcgatgtcgataccatgcctgaactcatgcttgagcatgatcttgctattggagctctgggtggaacgacatgggagcgttgtgtgatggggttgcctgcagtaaacatcgcgatagcggataatcaaatgaccatcgcagaatcgttacgcagcagtggcgctattgttttatacgcagactcgcttcaatctcagacctttatgtcggcactgatcgacctgataacgcgttacaaagaacatatgctgctggctatgaatatttgtgatgggcatggcatgtcgcgagtcgtacaaaacattctttcgcaacctgccagagaggggaaaaatgtgattctcagacctgcgacagaaagagatatcgattttgtctataaattacagtgcgagccgcaaaccagagagtttgccagaaatcctgaaattcccgcttatgacgatcatgttgcatggatgaagcgcaaactcaacgacgagcgggtaaagttctacattatcgagtgcgaaattgcttgcggagtattacgactcgatcctattgagcatagcggtgcagattttgaaatatccattttcatgactgaaaaaagtcaggggaagggcattgcaagtgccgctattaagcgagccatgatgctaaacaatgacgtcaaaatgcttgcaacagtgctggcagcaaataccgcgtcgcacctgctatttcaacgattaggttttactaaaatttccaatagcgaatacttaagtgagtaa

SEQ ID NO: 276 - DNA, 1152 bp, Kosakonia cowanii
  source 1..1152: mol_type = genomic DNA
atgaaatttattccctatggacgtcaggatatttctggtgaagatatccaggccgtcgttgatgtactgcaatctgactttttaacgcagggaccgtgtgttcctcagtttgagcaggcaatcgcgaattacgtaggtgtgaaacacgcgctggctgttaatagcgcaacctcagcgctccacatcgcttgtatggcgttaggaatggaagagggcgactggctgtggacgacgccgaacacgtttgtggcgtctgcaaactgcgcgcgttactgcaatgggaatgttagtttcgtggatatcgatcctgcgacctataacatgagcgttgctgcgctcgagacaaaactcagctatgcaaaagcagaaggcaccttaccgaaagttgtggtacccgttgcatttgctggccagtcctgcgaaatggaagcgattcacaaactttcacgtgaatacggctttgccattatcgaagatgcttcgcatgccattggcggcaaatatcagggcgagcaaatcggtaattcaaaatatgccgatgtcactattctcagttttcacccggtcaaaatcatcactaccgctgaaggcggaatggcattaaccaataatgatgagctagcggaaaaactggcgttgctgcgtagccacggtatcacccgtgatgcggacaaaatgacaaaagaggcagaaggcggctggtattatcagcaggtagatctgggtcttaattaccggatgaccgaactgcaagctgcgctcggtgtgagccaattaaaacgtattgatgagttcgttgctgcacgccaccgtttagcgaagcgttacgacgcgcagcttgctggcgtacctctgacacttcctcatcaggcggagagcggttatagcgcactgcacctctacccgataatggttaacgattctgcaaaacgtaaaccgcttttcgattatctgcgtgagaaaggcatcggtgtgaatgtgcattatattcctgtacatacacagccctattaccagcagttaggtcataaagttggcgattatcccgcagctgaagagtattactcgcgcgcgatcagcatcccgatgtattcaacgttatcggaagatgaacaggatttcgtcataaatgctattcgggagtttttctaa

SEQ ID NO: 277 - DNA, 1161 bp, Kosakonia cowanii
  source 1..1161: mol_type = genomic DNA
atgtcgaactttgatgatctttatgcctatgttgaagaaagagatttaagagataaaaatttcaaaactaatattagaagtttatatctgaaaaacgcaaaatggatatttccgtttaatgatgttctttcttcaatattttttttctggttacgtccagctaagaaaaagaaatacttctttcttgggacaagatttacgcatcttatctctgcccttccagtagaggaagtatgtatcattggcggtccaaagcagttattgtattgccttagaaataatatccactatattccaaatggagtgttttggaaattattgagtaaaggctttattgtcaataatttcagtaaaataaaacagactgcatacaaacagggtaaactgctcgggaaaatacgtcacgatacccagcaagcactaatgatcgttgaaaatgactcgcttcctattcaacgcttatattgtaatatagcagcagaatcaaatattaaaacggtttgtattcagcatggcctctttcagtcgagaacagaccctaaaaccatcgatggttggaaatgcgattacttcatttgttacgatgacaaacaaaaagaagtgctttcaggtttaggtatagatcgtcataaagtgatgataggtggattctatgaacctattattcaagtgaagacatattccaaaaaacctccgctcaaagtttgttttttagggcagccatggtttaagtatggggatgtttataaaaataaatatcagcacattgttaatgttcttagcacctctcttcgcgagcctgaaagtcatttttactttaagcctcatccttgggaaaaggatgctgagtatcttaaaaatatgagcaatgtctttatgggaagtatgcaagaggctatcgaaagctacgatgtttttttctcttttacctcaactgctttgctagaagttacgatggcgggaaaagttgcaatacaaatttatgacgacttatttgcttgtgataactttgaaacgctcggctatgcttactctgtcaaaagtgatgagttgaaggaaaatattcccgctttgctacgacacacgccgtatccattagaattaccgtcctttgaccacttggttaaccaaattaaattattaactaaggtgatactgtga

SEQ ID NO: 278 - DNA, 1407 bp, Kosakonia cowanii
  source 1..1407: mol_type = genomic DNA
gtgagtgaaaattcgggaaaacaatttaactcgatattcataataatattatctttaacatgtgttatagctgcaagtgtaagttcagatttatttattgttgcaggtagtattagtctggctttattctttgctttttgtataactatttataaaaagcagcaatactttttctttttggtgctacctttcctttttccacaatttacagcgatagtgtcgaatttttctctcgaaaccggcgcgtttattgaagagttaaaggtaacatcatacgcaacaggtggggcaacaaggctggttttctttgtgctctcctttttctttgttgccctggtggtctttcggtttattaataagtacagagtaaatcgatttttcttcgttcttcgtggcgattattcaaaattagagcgacaattaattttttttgtagctgggctgatttttttagcgctgacaataaatgcattgatatggggtagtccactattaaaaggcgttcagcgtttcgattattggacggcacatccttatccatctttcaggaatttgctttatcaggggtacttactgtcatttattcttggggtttacataaccaaatcaaaactaaccactcaacgtaaaagttggaaatatatatttttagttttatgtttttgcttgtttaatattgtatatggtgagaaattcactggcgtcttcttgacactgctctatttctttgtgggcttttttggtgcgctggtactctataaaaaaattaacgtagtaactggaaaaaacattatctttgttctgattgttgggttgttattgtatggtttgatctactatcaatacaagtacatccaccaactgccagggagtatattttctttcatagaaagtcgcgtgcttaacttgcaaggcgaagtttggtgggcaatagatcgcaaagattacgacggcagtgctctctcatatctttataaatatagcagtgattgtaccgagactggtggcctttactttctaatgtatcaaattgcacccggaagtatggttgattcatattgtcaacgtggcataacgtttactatgggatatcctgcgatcctattaccgaccgctggttactttttagggtatgtccttaatcttctatttgctgcactggtaggcataaccctttttctcattaaaaaatctattgagtacccaaatgttatttcactgttcctttcggctaaagttctgctaatagaaacgcatgcgcttaatatgggaaatatatataacattctggatgtaaaattctttgcttatttcttactgttgctcttcttttctgaattaaggttaaaaaatgcacaaattggtagccatgtacctgcctcaattccatccggtcaagcgaaataa

SEQ ID NO: 279 - DNA, 1035 bp, Kosakonia cowanii
  source 1..1035: mol_type = genomic DNA
atgtttaagaataaagtattgttgattactggtggtactggttcttttggtaatgcggtgctgcgaagatttctcgaaactgatattgctgagatccgtattttcagccgagatgaaaaaaaacaagatgacatgcggaagaaatataatagcaataagctgaagttctacatcggtgacgttcgcgattacaacagtattagcaacgctacacgcggtgttgattttatctatcatgctgcagcgcttaaacaagtaccgtcctgtgagttccacccgatggaggccgttaaaactaacgtcctcggcacagaaaacgtacttgaagccgctattaacaatgaagtgaaacgtgttgtttgcctcagtactgacaaagcggtctatcctatcaatgccatgggtatctccaaggcaatgatggagaaagtgatggtcgctaaatcccgtaatgtgaacagcgcaaaaacggtgatttgcggtacgcgttatggcaacgttatggcttctcgtggctcggtgattcctctgtttgttgacctgattcaagcgggcaaagcgctgacgattaccgatccgaacatgacgcgtttcatgatgacgctggaagatgcggttgatctggttctttatgcctttgagcacggtaacaacggtgatattttcgtccagaaagcgcctgctgcaacgattgagacgctggccattgctctgaaagagctgttgaatgttaacgatcatccgatcaatgttattggtactcgccatggcgaaaaactttacgaagcgctgctgagccgtgaagagatgatcgcctccattgatatgggtgattactaccgtgtaccgcctgatctgcgtgacctgaactacggaaaatacgtagaacaaggtgatacccgtatctctgcggtggacgattataactctcacaatacacagcgactcgatgtcgaaggcatgaaaacgctgctgctgaagctgccgtttatccgtgcactgcgtgatggtaaaaactacgagctggatgcctga

SEQ ID NO: 280 - DNA, 711 bp, Kosakonia cowanii
  source 1..711: mol_type = genomic DNA
atgaacgtggcaatcatccctgcgcgtggtggtagcaagcgcataccgcgaaaaaatattaaagagttttgtggtaaacctatgattgcctggtcaattgaagccgctctaaagagcggcgtttttgaccacgttatcgtgtcgacagatgacgaagaaatagctgacgtggcgcaaaactatggtgcagaagtaccttttgtacgaccagaagagctgtcgaatgattatgctggcacgatccccgtcattcggcatgccactgtttggcttgttgagcaggggtatgacgtgcagaacgtttgttgcatctatgctaccgctccttttattacgcatgacgatattattcgtgggcttgaaatccttaaaagccatgaggctgattacgcttttacggtcacacggtttccttatcctatccagcgagcgctgaaaataaaccagcatgacaaaatcggcatgttcaatcccgagatgttccatgttcgctcccaggatttagaagagtcatggcacgatgccgggcagttgtattggggtactcgcgaagcgtgggagcaggaaaaaccgattttcacctctaacgcctatccagtgatccttcccgcggagcgtgtacaagatattgatacaccagaggactggcgagtagcggagtggttgttcaaagccatggaattcaagaatgaacatttttctgcgagttga

SEQ ID NO: 281 - DNA, 1056 bp, Kosakonia cowanii
  source 1..1056: mol_type = genomic DNA
atgaataattttatcactatcaatggacgcaaaatcggcaaagactattcgccatatatcatcgcagaactttcggccaaccataatggcgatatcaatcgtgcatataaaatcatggaagaagccaaagccgcaggcgcagatgcaatcaaattacaaacctatcgcgctgataccattacgattgaccatgatagtgaagatttccagatccatggtggattgtgggatgggcaaacgttattcaatctctataaaggcgcgcaaatgccgtgggaatggcatgagccgctttttgcaaaagcgaaagaactgggcatcaccatttttagtagcccgtttgattttaccgctgttgatctcttggaaaaattagatgcaccggcctataaaatcgcctcatttgaagctattgacctgccattaattaagtatgtcgccaaaacaggcaagccgatgattatttcgaccggcatggccgatgaggcagaaattcaggaagctatcgacgctgcttatgaaggcggttgtagggaattggtagttttacattgcgtaagtggctatccggctcccgcggcagattataatctcgccactattccggatatggcgcagcggtttaatgtgattcctggcctgtctgaccataccatcgataataccaccgctattgcagctgttgtattaggtgccagcgtgattgagaaacacgttactctcgatcgtaatggtgggggccctgacgatagtttttcactagagccttcagaactgcacgctttatgtcgcgatgcgaaaactgcatggcaagcgcttggtcgtgttaattacgagcgtaaggagagcgaaaaggggaatgcgaaattccgtcgatctctctatgtcgtcaaagacattaaaaaaggtgagctgttcactacagaaaatattaaaagtatacgtccaggtttcggtgttgcgcccaagtatatggataatattcttggtcaaacggctgcccgcgatatcaaatatggcgagccagttaaaatggatatgattaatgctgaatag

SEQ ID NO: 282 - DNA, 999 bp, Kosakonia cowanii
  source 1..999: mol_type = genomic DNA
atgtttaatgataaagtaattcttgtaactggcggtactgggtcgtttggtaataaatttgttcgcatgacgcttgaaaaatataatccgaaaaaaattatcatttactctcgtgacgaaatgaagcagtgggaaatggctaaacattttaaagatgaaagccgcattcgctttttcattggtgatgttcgtgataaagagcgcctttaccgcgcgctggatggcgtcgattttgtcgtgcacgccgctgcgactaagattgtccccactgccgaatataatccatttgagtgtgtcaaaactaatatcaatggtgcgatgaatgttattgatgcctgtattgataaaggcattgaacgtgtggttgccctttcaacagataaagcaagtagcccggccaatctttatggcgctactaaactagcttccgacaagctgtttgttgccggaaactcctactctggcgcgtataaaactcgcttcgccgttgtacgttacggtaacgtaatgggatcacgtggttccgtaattcctttctttctctcaattaaagagaaaggcgaattacctatcactgacgatcgtatgacccgctttatgatcaccctcgaacaaggggtcgagttagtgtggcatgccttccaggacatggttggcggtgagatctatgtgaaaaaaatcccatccatgaaagttacggatgttgcgacagcagtagcgccagaagcgacgcaaaaagtcgttggtattcgtcccggcgaaaagctgcatgagcaaatgatcagcgcagaagatgcgcattacacctacgaatatccggaacattttaaaatcctgcctgctattcacaactggtgcgattcacctgagcgtattaaggatggtaagcgcgtgccggaaggctttgtctatgaaagcgacagcaatacggaatggatgagcgttgaagagctgcgccagtggatcgatgtgaaccgcgataaagtaggcaatatctga

SEQ ID NO: 283 - DNA, 1527 bp, Kosakonia cowanii
  source 1..1527: mol_type = genomic DNA
atgaacatttttctgcgagttgactcctcattatcaattggtacgggtcatatcgtcagaagcctgaatctggcgaatgcgctccgtaatactggggctgaatgtcattttattaccaagcagcataccggccacatcattcccaaaatcgagtctcaggattttaatgtcagcattattccgggcgcaccagagtctgaaggttatattgttgatgaaaagtcctggcttaacggtacgcaagctcaagacgcctgcgaatttattgcactggttgagcaggcggcggtaaaacctgaggttattattgttgatcactactcactggattatgagtgggaatacgctatcaaaaagcagtatccctgggcccgaatagtggttattgacgatctgtgtaatcggcagcattgggccgatatgattattgatcaaacatttaagcgcacacctgaagagtatggggcgctaaacaaagcgaatgggcagatatattcaggcacatcatacgcactcatcaatcctgctttcgttgcattaagcgcaaaatcgattaaaagaaaaaaagcgctacaagagccgaaatctgtgttgatcaccatgggaggcgtcgacgcacaaaacgtgactgagacgatacttacctggttgaatgaaaatgagaccacctttttcgacaaaatcaccatcgtaatgggacgcgcgtcaccgcatcaatctgcggtgcgagaggctgcgaaacacgcacgtttccctgttgaggtgcttatcgatgtcgataccatgcctgaactcatgcttgagcatgatcttgctattggagctctgggtggaacgacatgggagcgttgtgtgatggggttgcctgcagtaaacatcgcgatagcggataatcaaatgaccatcgcagaatcgttacgcagcagtggcgctattgttttatacgcagactcgcttcaatctcagacctttatgtcggcactgatcgacctgataacgcgttacaaagaacatatgctgctggctatgaatatttgtgatgggcatggcatgtcgcgagtcgtacaaaacattctttcgcaacctgccagagaggggaaaaatgtgattctcagacctgcgacagaaagagatatcgattttgtctataaattacagtgcgagccgcaaaccagagagtttgccagaaatcctgaaattcccgcttatgacgatcatgttgcatggatgaagcgcaaactcaacgacgagcgggtaaagttctacattatcgagtgcgaaattgcttgcggagtattacgactcgatcctattgagcatagcggtgcagattttgaaatatccattttcatgactgaaaaaagtcaggggaagggcattgcaagtgccgctattaagcgagccatgatgctaaacaatgacgtcaaaatgcttgcaacagtgctggcagcaaataccgcgtcgcacctgctatttcaacgattaggttttactaaaatttccaatagcgaatacttaagtgagtaa

SEQ ID NO: 284 - DNA, 1152 bp, Kosakonia cowanii
  source 1..1152: mol_type = genomic DNA
atgaaatttattccctatggacgtcaggatatttctggtgaagatatccaggccgtcgttgatgtactgcaatctgactttttaacgcagggaccgtgtgttcctcagtttgagcaggcaatcgcgaattacgtaggtgtgaaacacgcgctggctgttaatagcgcaacctcagcgctccacatcgcttgtatggcgttaggaatggaagagggcgactggctgtggacgacgccgaacacgtttgtggcgtctgcaaactgcgcgcgttactgcaatgggaatgttagtttcgtggatatcgatcctgcgacctataacatgagcgttgctgcgctcgagacaaaactcagctatgcaaaagcagaaggcaccttaccgaaagttgtggtacccgttgcatttgctggccagtcctgcgaaatggaagcgattcacaaactttcacgtgaatacggctttgccattatcgaagatgcttcgcatgccattggcggcaaatatcagggcgagcaaatcggtaattcaaaatatgccgatgtcactattctcagttttcacccggtcaaaatcatcactaccgctgaaggcggaatggcattaaccaataatgatgagctggcggaaaaactggcgttgctgcgtagccacggtatcacccgtgatgcggacaaaatgacaaaagaggcagaaggcggctggtattatcagcaggtagatctgggtcttaattaccggatgaccgaactgcaagctgcgctcggtgtgagccaattaaaacgtattgatgagttcgttgctgcacgccaccgtttagcgaagcgttacgacgcgcagcttgctggcgtacctctgacacttcctcatcaggcggagagcggttatagcgcactgcacctctacccgataatggttaacgattctgcaaaacgtaaaccgcttttcgattatctgcgtgagaaaggcatcggtgtgaatgtgcattatattcctgtacatacacagccctattaccagcagttaggtcataaagttggcgattatcccgcagctgaagagtattactcgcgcgcgatcagcatcccgatgtattcaacgttatcggaagatgaacaggatttcgtcataaatgctattcgggagtttttctaa

SEQ ID NO: 285 - DNA, 1146 bp, Kosakonia cowanii
  source 1..1146: mol_type = genomic DNA
atgctgaatagtatatatgagtatgttattagtcgcagtgaggataataacaaattcaggcaatccattatggatcaataccagaggaatgctcgtttctcacgtatgcatataaaggcattattattgcctctattcatgctcaccaaagccagagagaagaaaaagtattttttcttctcgaccaaatacgatgagataattacaaagttacctcgtgatgaggtttgtattattggtgggccaaagcagttattatttgcagtcaaaaataatttatcattaatctcgaatatggatttttggggcgaattgagtgagggtctcaaagactacaaaatttcgcctggtctaccaggcaaatcacgtgccctggaagcagagataagcaagttaatattgcccaacagcgtgtttattattgataatgattcaatgccaatgcaacgtttactcatagacattatgcgtaagtgtggagcaaaaatttgtttagttcaagatggtatttttcaggagaaaacggcaccgcatataatacatggttggtatagtgatcgagttctttgctatgacgtttatcaacaaaaaatcatagctaataagctaccaaatcatattaggattgatgtcgttggcttttataaaaaaatacatttctatgagttgagtaagaatgctcggaaaatctgctttttagggcaaccctggtacaaatatggcgaagattattgtgagaaatatctttcaatattaagtagcgttgagggtgttttccaaaatcatgagttttactataagccacatccatgggaggataatgccccatatatccacgcgataaaaaatatagcaaagggaagtatggatgaagcatttggtaattttgatgtgtttatttctttaacctcaactgctcttctggaagcaactttggctgggaaaattgctatacaagtgattgatgataaatttgagtgtgacgatttggcaacttataattacgcatattctttatcttcaggtgaaattaatacggataagtttgaacagttaataaatcgagggccgatcttaaaagttgcaccgactgtggacacaatttcattatatactgaatattttcagcaagaaaaatatatgtag

SEQ ID NO: 286 - DNA, 1401 bp, Kosakonia cowanii
  source 1..1401: mol_type = genomic DNA
atgagaaaatttagcctaggaactaaagtttttattatatatttttttgctcttacgttgagtttaattagtctgacaggttttcttgattcgcatttagttaatttctttagctttatatgttttttgctgtatttcctgtacatatacagagaaaagcagtttttgttctttcttttattaccgttttctttcccgcatttaacagccatcatttcaaacatctatttggatacaggagtttacatttccgaattatcgctcctttctgaagcaacaggcgctgcttcgaggttgatatttttcgtattgactatgtttacgatggctcattgtgtattctcgctgctctataataatatggctggaaaaacttgttatgtgaaacttccagtccgccgattcgaagataaagcgcttatcttgtttgctgtaataattattaccgctctggtttttgggctttataaatgggggtcgcctctttctgagggcgagcagcgatttgagtattggaaaaaccacccactaccttggttcaaatctttgctttatcaaacttacttactagggtttttgatcggttgcattattattcaagcgacaaacaagagaatattactttttgttctaattgtttgccttggcttgaacgttctgtatggtgaaaaatttacaggtttgatgatcacggttttatactttatatgtgggttcattgtttcttattacattaattatggtataccaaagagactggtaaatgttaaaaccaccttgcttgctatagtggcttttattcttgttttttctctggtttattatcaatacaaatatatacataatgttggtaacaatgtcgttggttatattctaaatcgcttgttctctttgcaaggggaagtctggtgggcaagtgattatctttactttaatgataaactgtctcctgattcatattatctcttcaatgagggggctagttgcgttgattatggtgggctttactatctgatgagaaatattgctccatggagtttggttagtgcatattgcgatcgtggtgttacttttacgatggggtttcctgcaatcggtcttgcaaccattggctacgctaatactattttattaagcataattgcaggtgcattggttggcctgacaagttttctgacaatgatttctattagaaatagaaattacatcgctctgttttttgctttcaaagttgtgttgatagaaactcacgctttgaatatgggaaatatgcataatatctttgactataagtttatgttttatctgattgcttttatttttatttcaaggattgcttttacttatgaaaaaattaatagccatgtacctgcctcaattccatccggtcaagcgaaataa

SEQ ID NO: 287 - DNA, 1137 bp, Kosakonia cowanii
  source 1..1137: mol_type = genomic DNA
atggctgccagaccccgtaaaaataatgtaagcgtaccgaatctatatccgctgtatagccggaaggtcaacaaggtttactggcgttataagcaccctacaacgggaaaatttcatgccctcggtactgacgaagcagaggctattgctattgctaccgaggcgaatactcgcctggcagagcaacgttctcgccaaatcatggcaataggcgacaagattgctaccagcaaaggtaaagcgattacaacaaatacatggcttgatcgttactggaaaatccaaaacgaaagactcgaaactggagatattaggctgaacacacacaagcaaaaagccaagcctgtggctttgctccgcgagcgtgttggtatgaagctaatatcaaatgtaaatgtgagagatatagccgaaatacttgaaggctatatttctgatggtcagccgagaatggcacaggtagttcgttcggtattgattgatgtttttaaagaagctcaacattacggagaagttccacccggatacaaccctgcccttgcaaccaagcaaccacgacggcgcattacgcggcaacgtctcaatttagaggaatggcaaaaaatttttgagatagcagatgccaaacatcaatatatgggtaacgccatgcttttagctatagtcacgggacagcggcttggagatgttgccaagatgaaattcagcgatatttgggacgaccatcttcacgtagttcaggaaaaaaccggaagcaaggttgcgatcccgctttctttaagattgaatgctattgattggagtttgagagatgtgatatcgcgctgccgtgattacgctgtaagtacgtatttgatacattttttccgctccacctctcagtctgaacgtggctcaagggtaaaaacaaacaccatcacaatgcatttcagtaaagcacgtgaccaagcaggaattgattggggagatggctccccagctacttttcacgaacagcgatctttggctgagcgtctttatgagcttcagggtttagatactcaaaaattgcttgggcataaatcacccaaacagacagcaagttaccatgatgatcgcggtaaagattggatcgcggtatcattcaaaggagcttag

SEQ ID NO: 288 - DNA, 165 bp, Kosakonia cowanii
  source 1..165: mol_type = genomic DNA
atgagcactcaatggcgcacgggcatgggcggcatcaccgggctggattacaacgtgctgccctggctgatgaagctgaacggggtggaggatgaggcaaccgcgttaacggatatccgcgtaatggaaagcgtggcgctgaagattatgcatcagggggcgtaa

SEQ ID NO: 289 - DNA, 351 bp, Kosakonia cowanii
  source 1..351: mol_type = genomic DNA
atgcctgttaactacactcgcatgaaagccacaagcacgcgcctgctcactgagaacggcgcggcgtacccggtaaagcgcaagggcacagtaactgtcatcggcggcattgagcatcgcgagccggataagaccttcactgcgatcggcgtgcggactgagtatagacccggcgaaattgacggtacggtcatcataaacggcgacatgcgtattgtgtttactgctgataccgagctgcgcaccggtgacatggtggacgtggacggcaaatggtaccgcattgagaagcccaacccggtcaatcctggcaagctgctgttgtgctaccgcgctcagctgagggcataa

SEQ ID NO: 290 - DNA, 219 bp, Kosakonia cowanii
  source 1..219: mol_type = genomic DNA
atgaaagctattgataaagccattaccaaagcaggaaccgccacccgcttagccgaattactaaccgtaagcgccatgactgttagccattggcggaatcgctatcgaggtatcgttcctgcagaccgcgtcctgcaaatttatgcagtcaccggcgtaactccccacgaactgcgcccagatctctacccaaacccgtctgacgggttaccgaagtaa

SEQ ID NO: 291 - DNA, 129 bp, Kosakonia cowanii
  source 1..129: mol_type = genomic DNA
atgacagtactaaaaatggtgaaagccgcgctggtgagacagcaacggctttcgggtgcaattacggacagcaactgcgaggtcattatgacaaacgctcatttaaaacaccaggcgaaaggggcatag

SEQ ID NO: 292 - DNA, 177 bp, Kosakonia cowanii
  source 1..177: mol_type = genomic DNA
atgactgagcgaggcatgatattcggtggcaaaatggtgcgcgccattctcaacggcgggaagaagcagacacagcggattatgaaaaaacagccagcaaaattgccatcgacagataacgtattaatcctcgacatgtacagtggcaaccatgcatcttttagaaataacccatga

SEQ ID NO: 293 - DNA, 240 bp, Kosakonia cowanii
  source 1..240: mol_type = genomic DNA
gtgaaaaaaagtcagggccaaggcgactggtacgatattgtcaggcgttcagacggtaagcttatggggtcaatgccgctcgaaagccgcaacctcgtctacatcaaaaatggcatgttttcatgtcgccctttgatggaggatgaaggtgttttcaatctgtcgtccggaacacgttttcttcgccgcctcggctaccgcctcgaacaaccctctgatatgatgatatcaacggactga

SEQ ID NO: 294 - DNA, 201 bp, Kosakonia cowanii
  source 1..201: mol_type = genomic DNA
atgaaagagacctggttctatcacatggaatgcaccacggagcaggcagaagagctgctggcgcaataccgccgccgcggcgttaaggtcgagcgcagcctcaaccctgatctcatcacctggaccgtcagcgcccagctgccggagggcaatcatccgccgcgccctagccgggtatggcaaagcaaggcgtggggttga

SEQ ID NO: 295 - DNA, 201 bp, Kosakonia cowanii
  source 1..201: mol_type = genomic DNA
atgactttcttcattgtctgggaagcatacacacgcgactggcaactgatgcagaagggctcacgcttcatgagcactgacgatcctgacatcattgatgttgatcttgctgactatgtggcagacatggcaaaagcactcggtattgaggagaaatacctcgtaatcacttcggttcaatcgcttggatttttgaactag

SEQ ID NO: 296 - DNA, 243 bp, Kosakonia cowanii
  source 1..243: mol_type = genomic DNA
atgccatttagcacgctgatcaaaaccataacaatttcaaatgcagtttcagaggatttcaaattcgagatttaccagaatgaaaaggctcttttccatgccgatatatcccgtaaggatccactcggtaaatgggagcagttccgcaataagtttagatttagcaaagctttagacgttgaggaagttattgggcgttgtagaaaacttgttgatgatcaattccttgctatgaaagagtaa

SEQ ID NO: 297 - DNA, 252 bp, Kosakonia cowanii
  source 1..252: mol_type = genomic DNA
atgaaaatgattaacgctgcggcggtagtgctggtttcgttaatggcatcaggctgcgccagcaacacgcccccgctgtgctataacgaggctgtggtgatgaaaaaacgtgttgcggtacccgtattcggcataagaaaaccggtcagcaccaccgaatatctctccggcggcagcttcggttatcagtgggttgagcggagtgcttttacagacacctcgtcctgcgacaggctgccgctgactgaatga

SEQ ID NO: 298 - DNA, 177 bp, Kosakonia cowanii
  source 1..177: mol_type = genomic DNA
atgaacaggaaagcgtttataaatgattttatatcatggataaataataacattgagtcacatctgaaaattgatgatgtcgccataaagtccggttattcgaaatggcgcttacaaaggctgtttttagcggagaccgggcaggctcttggtcagttcatcagagaaaaaagttag

SEQ ID NO: 299 - DNA, 147 bp, Kosakonia cowanii
  source 1..147: mol_type = genomic DNA
atggttttgactctcagcaatcatttaccagagcgtttcataaaaagtatcatctaccccccccgcaaaaatatagaaaaaaatttagccgtcagtatagtaacgttttttattccgacggaaagtaaaataactataataacataa

SEQ ID NO: 300 - DNA, 1083 bp, Kosakonia cowanii
  source 1..1083: mol_type = genomic DNA
atgcagaggccagcccgttacgacgctaacctgccccgtaacctgacctttcgcaagagagataagctttattcctggcgcaacccaataaccggccaggtaatctacctgggccgcattgatcgcagggaagcgatagcccaggccattgaagccaacagctatcttgatcagaactatatcccctccagtctacttcagcgcattaaagaaacgcccaccctgactatggctaaatggctggagaggtatgacattattctcgagcgaagggaattaaaaccaaacacaatgaaagttcgcaggaaccagatagagacgatcagaaaagagttcggcaccatcgctattagcgcagttactacaaaagacattgcggaatttttggaaacatacattgcctgcgataaaaaaagcatggctgcaggtctgagatctgtactactcgatgtattcagagaggcgctcgtggagggccatatagaaaggaacccggcagaacctactcgcaccccggcaccaaaagttaagcgggaacgtctactgctcgaagcgtattttacgatacgagaaacagcagctgctaattcagtatgggcggcaaatgcatttgatcttgcgttggtcacggctcagcgacgcgaggatatagctatgatgaaattcactgatatccgggaagacagattgcttgtcacacaggagaaaacagggaataaattagccatcccattagacctgaaactggaagcggccgatcttcatttaaaagaagtgatagaacgttgcagagtgaacaatccatctgagttcctgctttactcgccggtgcgtcggggtggtagaaagccaggaccattgacgccggatgggttaacccaggcattttcagatacccgtgatattactgtgttgaaatttggcccttacccgccgtcatttcacgaaattaggagtctggccagtaggctttatgagaaggaaaaaggcgaagaatttgcgcagcggctgttgggccataaaaatttatcaatgaccaaaaaatacttggactcccgtggggctgagtatgttagggtttag

SEQ ID NO: 301 - DNA, 270 bp, Kosakonia cowanii
  source 1..270: mol_type = genomic DNA
atggcaaagcttcttaatttgcgggaatgggccgctgaagtgtattcatcaccgccatcgctttctactcttcgcagatgggtacgtgaaggcaagatctatcctgcccccgagctacacggtaaagagtataagctccgcccggatgctatctatgttaatccgagcaagaagaatttgcgattaaaaccgcagcatctaaaaattccgtccaaagggactttactggagagattacagaatgcagaggccagcccgttacgacgctaa

SEQ ID NO: 302 - DNA, 1077 bp, Kosakonia cowanii
  source 1..1077: mol_type = genomic DNA
atgcagaacacaaacgtagcagtagccgaccagaacgctgtcgttaactcaaacatcgcgctgttcgattcacagtaccttaatgccatcagcactttcgcccagattatggcgcagggtgcggcgacagtaccgaaacaccttcagggcaaccaagccgactgtatggccgttgcaatgcaggcggcgcaatggcaaatgaaccctttcgccgtggcgcagaaaacccatctgattaacggcgtgctgggatatgaggcccagctggtaaacgcagtgatttcacgcagcggcgtgctggcgaatcgctttgagtatgagtggtacggcccatgggaaaaagtggtcggaaaatttcacatccgcaaaggtgaaaaaggcgaataccgctttcctggctggaccatggcggacgaagcaggtatcggcattatcatccgcgcaacgctcaaaggcgaagatcacccccgtgagctggatctgctgctgactcaggcccgcacccgtaattcgacactgtgggctgacgatccccgccagcaactcgcctatctggcagtaaaacgctgggcgcgtctgttctgtccggatgtgatcctgggcgtttacacacctgatgagcttgaagagcgtcaggaaaaagaaatcaacccagcaccgcagcagcgcgtaagcgttgctgatatcccggctgaatcgacaactaatagcgcgcaagagtccggtaccaatattgatggcatggccgacgagttccgcgatcgcattgaagcagctcaatccgtggaccagaccaaagccgtgcgggttgatattgaagcagcaaaaactactctcggttcggcgctgtttactgagctgaaaaacaaagccgtacggcgctactacttggtagacgcccgcaacaaggtggaagcggcgatcaactcccttccccagcctgacgaaccggatgctgcagagcagttcaccaaagcagagcaggcactggctgctgccaagcgtcatctgggcgatgagctgtatgaccagtttgccgttaccctgctcgatatgaagcccgaatacgtggcatga

SEQ ID NO: 303 - DNA, 3402 bp, Kosakonia cowanii
  source 1..3402: mol_type = genomic DNA
atggaatttttccatctgcttaaagccagtcagaagtctggaaagaaagatgcggtgatttggttcactgcgaaaactgcagcgcgcgcaaacctgcaactggatgtcgagctggaagacgcaggcatcgaaaccggccgtggtaaagattacgccaagccgatccgtaccgacatgcctgttgttggcgacctgccagaagaaggcgtgattgattacacctggtgcgagcgctacgccctggccgaagacggccgcacctggaatgtgatcccgggtgccgcatctcagagcgagaccactatcgccccggacagcgccatcagcgatgagtatcagccggccgcggctataactgcccctgataccgcagatgtgggcacaacctccctgcttgaaaatcgcaccccggctgtccgcttcgccgtccatctgttgggtgataagtacctttcggagattagccaggagcagcagatcgttgccaccgaactggctatgaatgaggcaaatgtgtatttccagaacctgctgcaggccaaaaatgttgttcctgatatgagcgaactcagtcttcacgctgagtggaaactggtgcaggctgtcaaagacgttttcccgcaagataaacaacacgaacccgcgctgctggctgctttcatatcgagctgggtaaaagcagaagtcagcgaccgcgcccagcttattgaagactggctcagcagcaaactgcccgcccctgaactcgccggtaccagcgaatctggtgaagatgcgcttgcttcaagtgaaatagttcggcaggaggccaggcctgaagaagttgcccaagcccaagctctcgtacaggcatttcgcgatagggacattactgaactgcacgctgttcctacgctgtcgttccgtcaccgcctcctcgcacagtttattaccgaggaggaatacgcataccaaattgacaatgaacaactgaatactgtgcgccagctggaaatggacaccgataactcctacgtgcaaaacctgctgctggccgccgagaatgtcgaggggatgaaaaatcttcgtgacttcgagttctggaggcttaccgatgctgttaagcgcgtatttccttctgacaaagcgacgcctgatttatccctgatgctccagttcatgaaggcctggaaaacaacggactatatagatcgcggcctgctcgctaaggaatggattaacggtaaccgggtttcaaccattcggcgcaccgacaccggcacgaacgcgggcggcggcatcaaaacagaccgtaatgcagactatgagcatacgttggacacacttgatattgagatcgcgtgcgcaactctgccgatggattttgatatctacaatatccccggctctattcaccgcagggctaaagacattgttgctgcaaaagaaagcccctggaaagagtggtccacagcactgcgtaaaactgcaggtatcctggattactcgcgcgctgcaatttttgcgctcatccgcgaagcgtcctcaggcataacaacgttcccggatcgcatgactggttatatcagcgcgactctcaatgaatacaagcatgatacacctgaagccagaatcctcgccgctgctcgtcagattgatagcgcggccgtggatgccggggtcattcagtgcaccgagccgttacaccagctcgtcgccacccctcagccagaagtatccaacctcggcggcggcatgttctccatcgatggtctgctggatgaaaaagcaaacccggtcatcattaccccctcaaacgaagtcgcaaaacaggaagtggagatcattggcagtgtgcagatggaagagactgactcgagcaaagtcgaagctggtaatgcgttaccagcaatcgaagtcgctaatggagctgctgcgcaaacaattagcgtaagcccggcggatatcttcgccgctgccacaccagaacagacgcgcaacgttgcccccgatctggaccagaatattgatgctcttagccaggatgagccggaattacctccaaccgaaccagaaatgacagaaatagaaccggtagcggatatttccgagccagaagctgctgctaaggaatggccagcttacttcgagccaggccgttatgaaggtctgccgaacgacgtttaccacgccgcgaacggcatcagcagcacccaggtgaaggatgcccgtgtctccctgatgtatttcgaagcgcgccacgtctctaagaccatccagaaggagcggtcgaaggttctcgacatgggcaatctggtgcatgcgcttgcgctgcagccggagacgctggccgccgagttcagcattgagccgcagatccctgaaggtgcactcaccaccacggcgacgatccgcgagtgcattgacgagtacaacgccagcctgccgccgcagctgaacgctgacgatatcaaagcgctgctggaggcccataacgccaccctgcccgagccgctaccgctgggtgcagcattagacggaaccgcagaaagctatatggctctgccggaagagttccaacacatcgaggctgataagaagcagaccgctgcggctatgaaagcctgtatcaaagagtacaacgccaccctgcccgctccggtgaaaaccagcggcagccgtgacgcgctgctggagcagctggcgatcgtcaatcctgacctggttgcgcaggaggcgcagaagcccgcgccgctgaaagtgggcggcaccaaagtggatcagattcaggcgctcaaggctgtccgcccggataccgtgttcgccgacgaattgctggacgcttggcgtgagaacccggaaggcaaggtgctggtgacccgccagcagctggaaaccgcgctggctatacagaaagcgctgcatgcgcacccgaccgccggaaagctgctgcagcatcctgatcgcgccgttgagactagctatttcggcatcgacgaagagaccggcctcgaaatccgtgtgcgccccgaccttgaactggacgtggatggcgtgcgcatcggtgccgacctcaaaacgatttctatgtggaacatcaagcagtcaggtctgcgggcgaaactgcaccgtgaaatcatcgatcgcgattaccacctgagcgccggtatgtacatggagacggcaagcctcgaccagttcttctggatcttcgtcaacaaggacgagggatatcactggattgccattgttgaggcttcgcaggagctggtggagttgggcatcctggagtaccgcgccacgatgcgcgccattgccaacgcattcgataccggcgagtggccagcgccgatcaccaccgactacaccgacgaactcaccgagtacgatctgcgccgccttgaagcgctgcgcgcggcttaa

SEQ ID NO: 304 - DNA, 996 bp, Kosakonia cowanii
  source 1..996: mol_type = genomic DNA
atgactaaacatatcgataacgatgcagataatgagccttcaggaaaagcaataggcggtaaagcaaaagctgcaaaaatgacacctgaagaaagaaaggaagctgcaaaaaaaatggcagcggctaaaaaggaattggcatcacttcctgtagctgaatatggatcttcagatgccccactacgcattggtgatgctgagatacaatgctatgtcctcagtgatggctcacgtgttctttctcaaaggggggtgttttccggattaggaatgtctggtggtgctgctgaccgcctacttaatttcgtaggtggggacaggataaaacccttcttaaacaatgacatactgccggttatcgaaaacccaataaaattcagacacaaaaacggtggaggagtcgcttttggttatcctgcaaccatattggcagacatttgcgatgcaattctcgcggccagaaaagaaggaaaacttcaaaaacaacaggagcatttagctgaacgtgctgaactactcgttcgtggctttgctcgagttggtatagtagctctaattgatgaagcgaccggttatcagaaagctcgtgagcgagatgcactcgcaaaaatacttgaagcttttgttgctaaagaattacaaccatgggtacataccttccaacctgattattacgagcagttgtgccgtctcagaggggttccgtatccaccccaaaagaaaaattttccatcttattttggtacattgaccaacaaaattgtctatgaccgacttgccccgggattacgcgacgagctaaagagcgaagcagctaaaagtaagaagaaggggcgtctgcatcaacatcttactcaagaaattggccatcccaagctcagagagcatctatcttcagttgttacaatcatgaaattgagtaaggattacgaacactttgagggtaacttagaaatggttcatcctgagctgccgcctaaaactgatattgaataa

SEQ ID NO: 305 - DNA, 390 bp, Kosakonia cowanii
  source 1..390: mol_type = genomic DNA
atgaaagaaaaaactcatcagattaaccacccacaagttcaaaggcttaatgagatccttgaacttaagagtttgaccaaatcagacatggcacgcatttgtggagtcagtgctcagtcggtcaataactggttcgttcgtgggacgattgggaaaagctcagcaataaagctggcggatgcgcttggggtaagccttgagtggattcttggcaaggaagttggcgaaaaagacggccttaagccggacgaacagcgtctgctcgagctataccgacagttgccggaggaagaacaacagaacatgctgcgcattttcgcgcttcgtttaaaagaactagatgaattgtacgagaaatacatgaaggggcgtgttcgttcacaggattga

SEQ ID NO: 306 - DNA, 564 bp, Kosakonia cowanii
  source 1..564: mol_type = genomic DNA
atgcaaacggtaggttttcgtgatgatagcagggggctgcccgctccgctgagatctaattatcaaggcgttccgcgcaataactgcaagctcaatcatattcgggaagcagtgaaagcgtggaacagggcaacgcccggttctgcgcagctacacatctcgcagctggtggcgaaggagtggatagcgcgcggggggcgcggcctgttactggcaggttctgagcacaacactaagcagaattttttccggatgattaacgatcccggcccgaagaatgacaaaaatctgctgcagcttatcccggtcatcatcgatgtgatggcccgtgataacgagcaggtagcgcgccgctttgggctaatcagcggaaagacgaaggccgagcttattgctgaagcgatgaaagagtgcgccgaagctaagcaggccgttctgctcaacgtgccagagcatcaaaaactgaaggaggtgagcgagggtattacgtcgctgttccggctgatgccagagcagacaggggcgctgatgacgatcgtcacgtcaatgctgggtgcagtatga

SEQ ID NO: 307 - DNA, 933 bp, Kosakonia cowanii
  source 1..933: mol_type = genomic DNA
atggagaaccagaagaccggtttcatcccgttgtaccggagtgtactgaagcagtcctgggcgaaggacgtatatcttcgcaccctgtgggaaaacctgcttcttactgctgcgagacagccctatacggctaactttaagggccgtcagtggccattgcagaccggacaactggtgaccaccacagccgatctggggctggatttatgcgaccggaacggggaacccaccagccgtcacgcagtggatcgtatgctcgctttttttgagaaagaagggatgatcgccacagccggagaacgccggaaaggcacggtgatcaccatcacgaactatgcgctttatgctcaaaaaatggacgatttacccgcgcataacggcgcgcataacagcgagcatttccccgcgcataacgaatccagtaacggcgcggcttcggagggtagtgccgcgcataaccccgagcataagggcgcgcttaagcccgcgcatcatgaacaagaagtaatattaaatactaacgtatttaatgatcgtcagaaaaaatccaaatctcttcctgatgctgcagttcagacccccgcaggtaacaagtggggtaccgctgaagatctgcagtgcgcagagtggatgctcgccctgcgcaacatcaccaagccttcaatgaaaaaaccgaacctgacctcctgggcgaatgacatccgcatgatgcgccagctcgacggccgcacgcatcgcgaaatttgccagctgttcaaatgggctgcgcaggattcgttctggcacaaaaacatcctatcgcccgccaaactgcgtaagcagtgggacacactggtgctgcaccgcgaggatggcagccgtaagaccaccagcgatgcaccggccagtgacgcgcactggaacagccctgaagcctggaaggatttcatatga

SEQ ID NO: 308 - DNA, 690 bp, Kosakonia cowanii
  source 1..690: mol_type = genomic DNA
atgaaccaagaactgtttcacgcagtgcagaaccgcgacggcgaaatgctggcgcgcatggctggcagctgccgcgaacaggccaaggtgatcaacagcgacgccgagcgcatggtggatctcctgttcagccaactcaagcaagtttttccggcggccacgcagaccaacctgcgcagcgaagcggatgagcgtacggccaaacagcagtggatcgccacgttcgccgaaaacggcatccggagccgcgagcaactggtagccggaatgcagaaagcgcgtgccagcgtgtcaccgttctggccttcgccggggcagtttgtcgcctggtgccgtgaaggcaagggcctcctcggtgtgagcccagcggacgtcatgaccgaattttggaagtggcggaagctcgttttcaaataccccaccagtgagcaatacccgtggccacagccgctgctgtatcacgtttgcctggagctgcgccgccggggcgttgatcgccagatgaacgagaaagagctgctcagtgaagccgggcatcttctggcgcactgggaaaagcgtgttgctgaaggtaagccgatcccacctgttcgccgcgcgctggcagcgccgcataaggatcgggggccgacacccgcagaaatgctgatggccgagtacaagcgccgccaggcgcaggggagggtttga

SEQ ID NO: 309 - DNA, 324 bp, Kosakonia cowanii
  source 1..324: mol_type = genomic DNA
gtgtgcaaccgcttaaaaccaaagcaaaaggccatcgtggagttcatcaagacaaacggaccggcaacgccccgccagatccgtaagctgctcggctgcgacatccgtgaggcctacgaccgtctcaagcggctgggtatggccgggatcgtcaaaaatatcggcaaaccgaagcatccggaataccagctggtgcagcgctggcaggaaaaaatcaagcggccaaagccgcggataccagcagcgccatccgccgccgatgtctgccgccagaactggcagggctacgaaattcataaaatttttgggagtgcgcgggcatga

SEQ ID NO: 310 - DNA, 345 bp, Kosakonia cowanii
  source 1..345: mol_type = genomic DNA
atgagtgaatcacttaacaacaaagagctgatcgcggttggccatgagtttgcgaaggcgctgagcagcgacacgccgatcatcgacatcgccaaaatgatgtctcgcttggccgaacggctggactgcacaacggctgtactgcgcgaaacggctaaacagcgtgatgcgctggctgccctgcagcagcaagatatcaccaaggtgctggatgaatgctctgaatatctcgacagggactgcatcatggagtcgaacggtattagctacgaagttgctgctcaacgacaagtaggggcaaaggctcttcatgatgcattaattcgcaaaggagcagccctatga

SEQ ID NO: 311 - DNA, 357 bp, Kosakonia cowanii
  source 1..357: mol_type = genomic DNA
atgagcaagtcacttaaagcacgctgcatccgccgttgggaagttgagttcaaaggccgttgcgattcgaaactaagccccttttggcgtaagcaccacctgcgctgttacatccgcgaatgcgctctaataactgctgactgcatgatagagaacctggcttataacaacgcaatgcatgatttttttgctgaaaacggcgataaccgtggctggtcttcagagttctcgctctggtacgacagcaatcgtcgtgagcagtatcaaaaagaagcacagagctacctcaatgaagaggccagcaacgaggagatcgacgaagaaattcagaacgagctggaggcctggaatgactga

SEQ ID NO: 312 - DNA, 807 bp, Kosakonia cowanii
  source 1..807: mol_type = genomic DNA
atgttttcaaagtttatttttttatttgccattatctttgcttcatctattaacgctgcttcgtttgattgccaaaaagccacctctgtttcagaaaacattgtctgctcaaattatgaactaaataaacttgatgaagttctgggaaagaattatcaactcatgctgcgagctacagctgataaagaaactatcagtgaaggtcgtagacagcaggttttatggtttaaagaaaaagaaaaatgttctgatgcacaatgcttgcggagtgcttatattcagagaaacgatgaaatttgcgagtttattcttgatagaacaactgggcctttcgaatgcgtcagtacttcgtctgcaattcagtcaattcaaaagcaagagtacgatgagtcacacagcaagagtccagaccaggtagtacaagaaatttatgcccggcatgcacagcaggttgcttcattaggcttctctgaaagagagctgtcttcttggctttatttcacagttcaggcgggcgcaccgtatcgcaagttttcaactcttggacagtatcttgccatgatgtatgagctcgacggatttaagagcatctcaaaagttgatgacggtgagcattttggttttaaggttaaagtgtctgggcaacctagctctggatttgtattccatttggaagatgatgaatattatctcacaggcataatacagggagacgaaatttacgtggccccacagaacatacagatatccaacctgttttatagctacggagtttatgcacttggcaagaatggagctgctctttga

SEQ ID NO: 313 - DNA, 597 bp, Kosakonia cowanii
  source 1..597: mol_type = genomic DNA
atggcgcagttacaactcattaagcattcttctaatatcctgatccccgccacgccggagaccagcgattttctgcaatcaaaatgtaagctcggcgccgtgctggttgccgatttcaaacaagtccgcaacccggcttttcaccgtcgtttcttcgctttgctgaatctcggcttcgaatactgggagcctaccggcggggcgatctcctcaaatgaacgcaggctggttaccggctatgccaaatacctggcaatgttcggtgggagcgaaaccacgctgctggatgctgctgagcagtacctcgatcgtatcgccgataagcgcacgggcagcatcagcgtctgcaaatccttcgacgcctatcgtgcctgggtgattatcgagtccgggcactatgatgccatccagctgcctgacggaaccctccggaaacatccccgcagtatcgccttcgccaatatggacgaaaccgagtttcagcaactctataaagctgcgctcgatgttctgtggcgctggatcctgtccagggcattcagagaccagcgcgaggctgagaatgctgccgcgcagttgctgagcttcgggggctga

SEQ ID NO: 314 - DNA, 612 bp, Kosakonia cowanii
  source 1..612: mol_type = genomic DNA
atggctaagagactacgtcgtaaatgcgcaaacctgagctgccgccagtggttcaatccggtccgcgagaggcaagtggtttgcagcttcgagtgcgccagcgccatcggcaaagaacatacagcaaaagcccgtgaagccgctaagcagaaggaacttcagcggcagcgcactgaagagaaggctggccgtcagcggcgcgctgcgcgtcgtagggagctgaggccgatccgtcactgggtgcagatgactcagcgtgcattcaatgactggcggcgcgagatgctgctgggcgccgggcacggatgcatctcttgcggtaacaaaaccgcttttgcctggcatgccgggcattaccgcaccacagccgcagcaccgcaacttcgctttaatccggacaatatatggctccagtgctctgcctgtaacgtccacaaatcaggcaacatcgaggcataccgcgtcgctctagtcgagctgatcggcgaagagcgcgtgctggcgctcgagtccaacaacgaaacccaccgatacacccgggaagaactggacggcatccgcgccaaggccagggcagatcttcgagtactgaaacagcaggaggctgcgtga

SEQ ID NO: 315 - DNA, 804 bp, Kosakonia cowanii
  source 1..804: mol_type = genomic DNA
gtgaagcttgaatcttcactaaaacacttcagccctcagggggtgaatatcagcgacagcgttaaaggcacctctcctgacaggctgaccggtacagatgtaatggcagcgattggcaccaccagcagccgcgctcgcttcggtctcgctgcattctttgggaaggccggcatcagtaaaacagatgagcaaatcgcagtgcaggcgctggtgcggtacgcgatggaagttgccccgaagaatgtgcgtaaagcagctggtggtgagttgggctggtgcatgcaggtgctggcgcagtttgcctttgctgagtatgcccgttcggcagccagcagcagcacctgcaccacgtgcagcgggacgggctttattctcaggcgcgaggatgtgatcaaacaccctggcatcttcaatgctgactgtgtggagctggttgccgcgaagattaaaaatgagctggtaaaacatgcatgcacagcctgtcgaggtaagggcatcattcctgcgcgttgccgctgtggcgggaaaggggaagtacttgatcgcgtggcaacgaaagagcggggcgcgccggtattcaaaacctgtgagcgatgctccggcaatggcttctcttcagtaccgtctacggctgcgcacaaggctattatccggcgcttgccagatttgcatgtcaggacatggactcgcaactggaagccatttcttgagtcgctggtgaggatttgtcagcaggaagaggccaaagctgagaaagaatttcagaatgcaaccagctttaacgaagaagagaacaaaatttag

SEQ ID NO: 316 - DNA, 360 bp, Kosakonia cowanii
  source 1..360: mol_type = genomic DNA
atgaaacgtatgccggacaaagacgctggtttctgggcaggtcttattgcctggctatacagccacaaaacagaatggggatatgcaggtgtggcgggcatgttttctctgctgcgaagtgcttatgcgcagtcctcatggagtaagcgtgttcttgacgccgtgtcgtgcagcgcactggcattcttcgccgcgccgacgcttcaggtggtcgggggcgttcttaactggaatgtccccgatacagccgctcaggtgtttgcggtgtacatcgggtatgtcggcaatgactacatcagcgagaagctgcgcgggtggattagccgcagaacgggagataacagtgaaaatcagtcctga

SEQ ID NO: 317 - DNA, 453 bp, Kosakonia cowanii
  source 1..453: mol_type = genomic DNA
atgaacccgatcaacttcataaagaactattcacacattatcgttatcggccttatttgcattgcgctgtggggactgaatgcccgtaacgcccagttaactgcgactaatgagcggctggagaagctggcgaacagcaaagatgaccagattaacgatctgcgttcaaaaaatgacggcctggccgccagcgtgggcgaactggtaaccgccgtcaggcagcagaaccaagtgatgtcccaggtcactgaacagcgcgctgtaaccgcacagcaaaaccggaagctacagaatgaaattaagcaataccttgaagcggataagtgtgcacagtctcgtgtgcctgataatgctgctgaccggctgcgcgccgcagcaaaagccgcgggtggagtaccggacaataagccagccgcaaatcagcctgcccgcagagctgacctcccgcattga

SEQ ID NO: 318 - DNA, 1008 bp, Kosakonia cowanii
  source 1..1008: mol_type = genomic DNA
atggcaaagccggactggggcgagcttcagcagcggttcctgtccgatcatgccgcaactggcgtaacaccgaaggagtggtgtgaagcgcagggactgaactacgcgaccgcccgccgatatataaaaaagcccgcagcgcaaattgcgcaaaaaaatgcgcagaaaaaagtgcgcaatgcgcagaaggaaatagacgttaatgcactggtggaaaacgacgggttgacagctcagcagcgaatctttgtggcggaatacctgaaagactgcaacgccacccaggccgccatacgtgccaagtacagtgcaaagactgctgagcaaattggttatcagctccttcagaaaacttcagttgccgctgctattgataaacagcaaaaggcctccttgatgcgaacgcttgccagtgctgatgaggtgctggcgcagatgtggcagctcgctacttttgacgctaacgagctctcgcaatatcgccgtggtgcgtgccgctactgtcatggcttcggccataactatcaatggcgcgatatggtggagtttgaagagcatcggctaaaagcgatcgagaaaaagggtaaagagcctgtggacgttggcggttacggctatgaccacaaccgggaacctaacccggcgtgcccgcgctgcaatggagacggcatcggtcagccgtatttcgctgatacccgtaagctgccgcctgtttcccgtctggcgtattccggcatcaagctcggtaagaacggtgttgagatcactgccattagccgtgaacggatgtatgaagccgtaatgaagcggcttggcctggcggacagcgagtttgcgcagcagctgcagcagatcgaaatcgaacgtcgccagctggaggtggaaaaactccgcaaagagctggcagcagatcctgaagatgaggtaccgatgcccgtggcaattaacattaacgtcgcggatgctcgcgtaaggaaagacgatgacggggatatcgccgacccttaa

SEQ ID NO: 319 - DNA, 1311 bp, Kosakonia cowanii
  source 1..1311: mol_type = genomic DNA
atgacggggatatcgccgacccttaacgtaccgcaggcacagtttctggctatgccgcataagttcaagtcctacgtggcaggcttcggctccggtaaaacatgggtgggctgcgggggcatctgcaaggggatgtgggaacaccctaagatcaaccagggctacttcgctccgacctatccgcaaatccgggacatcttctatccgacagtggaggaggtggcgttcgactggggacttaaggtccaaatcaacgagagcaacaaagaggtccatttctacgccggaaggcagtaccgcggcaccaccatctgccgctcaatggagaaaccggccacgattgtcggctttaaaatcggcaacgcgctggtggatgagctcgacgtgatgcccgccctcaaagcgcagcaggcctggcggaaaatcatcgcccgtatgcgctataaggtcgctggactgcgtaacggcattgacgttaccaccacaccagaagggtataagttcgtttatcagcagttcgttaaggcagtgcgcgataagcctgagctggcaactctgtacggacttgtgcaggcttccacgtttgataatgaagcgaacctgcctgatgactatattccctcgctgcttgcgagctatccaccagagctgataaaagcctacctgcgcgggcatttcactaacctgacaagcggtaccatttaccaccagttcgatcgcaggctgaacaactgcacagatgaagagcagccgggcgagccgctgtttattggcatggacttcaacgtcggtaagatggcagccatcgttcatgtgaagcgtgaagggttgccgcgcgcggtgcgggagttagtgaaggtctatgacactccggcgatgatcaaacgcattcaggaagagttctggcgctatgagggcggccgctacgttgccagccgccagatttacatatatccggatgcctccggcgacagccgtaaatccaactgcgccagcctgaccgatattgcccagcttagagaagctgggttcagcgtcattgttaacgcttccaacccgccggtgaaagatcgtatcaactcgatgaacgccatgttctgtaatgcgctgggcgaacggcgttacctggttaatgtccagcgctgcccggtctatacggaaagccttgagcagcaggtatgggataaaaacggcgagccggacaaaaaggcagataacgatcaccccaatgatggtggcgggtattttattgttaaggattaccccatcgtcaaacctgcatactcaatcactatggataccaccttctga

SEQ ID NO: 320 - DNA, 1407 bp, Kosakonia cowanii
  source 1..1407: mol_type = genomic DNA
atggctaataacgacatcacctgggttcgtcctgagcaccgggcggccagtgctgcctggaagaaaatcagggacttttgcaaaggggcagaggcggtaaaagaaccgggcaacaactatctgcctttacttgactccacagacaagagcatgcgcaaccgcaagcgcaacgaagactacctgcagcgggcggtcttctatgcgattactggtaataccaagattggcctccttgggctggcctttcgaaaggatccgaccttttccgcgccggagaaactgagctatctgctgaagaacgccgacggcgctggcaccagcatttaccagcagtcgcagttggtgaccgagaacgtgctggaggtggcacgtgacgggctttatgtcgattacgctgagggtagtgggcaggccattatcctgcgctatctggccgagaacatcatcaactggcgcacgaagcgcatcaacgggcgcgatcagttggtgctggtggtgttgagggaatgtgtggagcaggaggatggctacgcgttcaaggatgaggtccagtatcgcgagcttgcgcttgaagagggccggttcatctgccgggtgtggcgccgcagcgcggatgccggttccgctgcatacgctgttaccagtgaataccagccgaagcctaaaggcaaagacagctgggacgaaatcccgtttaccttcgtcggcgcgcagaacaacgatccgactatcgacgactcaccactcgccgcgctggtggagataaaccatggtcacttccggaacagtgctgattacgaagacagcgtgtggttctgcggccaggtccagccctacatgacgggacttgatgaaggatggcgcgatcatctggaaaagaagggggttaaaatcggctcccgctcgccgctgctgctgcccagagagggcaactttggttatgcccaggcgcaacccaacatgctggcgaaagaggctatggacagtaagcgcgactacatggtgcagctgggtgcccggctcatcgagcagaacgcggcggtgaaaaccgcaacgcagtccagcagcgagcagacatcgtccacttctgtactggggatctgcgtctcgaacgtatcggaggcctattcactggccatcggctggtgcgcgaaatatctgggcgtcggcgagcagcaggcggcctacgcgatcaaccaggagttcattgctaaggtcgccgagtccggcatggttaccgccattgtgagcgcctggcagtccggtgcaatccgcgacactgatatgattcgtgcgctgcagaagcttgacctcatcaacccagcagacagccccgacgatatcattgacgaactgcacaatcccacccccaccctgattggcggtaacgatggcaacggtaaatga

SEQ ID NO: 321 - DNA, 1086 bp, Kosakonia cowanii
  source 1..1086: mol_type = genomic DNA
atggcaacggtaaatgaaatgttacgtgacgaagccatagcccacaccgtctggatcagccgttatagcactggtgtggcaaaccgcatggttaagctgctggacgacagcgacgctgagcttaccgcacggctgctgttggcgatggacagcctgcccatcagtcagtttacggtcagccgactggaaagcatgctggggagcgtacgcgagcttaaccagcaggcaatagcgggcatgcagaccagcctggcggatgagctcctgcagttggccgggcatgaagcaggctatcaactgagcctgtttgattcactgctgccgcagcgggtgaaagagcggtacccgctgcagagcatcacgcctgagcagatttacgcggccgctatggcacagccctttcagggacgtctgttgagcgaatgggccgataaccttgaagccgaccgcatggcacgcgttgtcaatgcagtgcgtcgcggctacctgcagggtgataccacggagaccattgccctgcaggttcgcgggatcgccagcaaaggctataaggacggggcgctgcagctcagccggaccaatgccgccagcattaccaaaacggctgtgaatcacctggcagccacggcgcggactaattttgcagaagccaacggcgatgtcctgaaaggtaaacagtggctctccaccctggacaacaaaaccacgccgacttgcatcatccgtgatcgcctccgttacactctggacaacaaacctgtcggtcacaaggttccgtatctgcaggggccggggaaaatccatttctgctgccgttccacggagacgctgattaccaaatcatggcgtgagcttgggatcgacagtaacgagctggatgaagatacacgcgccagcatggacgggcaggtgccagcggataccacatatcttgactggttggcccggcagtcgctgccgcgacagaatcagatcctcgggccggagcgggccgcgctttaccgtgctggcgagctgaagctcggggaaatgttcacagacaagggggaatggataagcctggcccgccttaaagcgctcagttaa

SEQ ID NO: 322 - DNA, 771 bp, Kosakonia cowanii
  source 1..771: mol_type = genomic DNA
atgttaatccgaaatatgctcctgaaatactacgcacctgaagatgatggccagggcggcgggggcggcggtaccgaaattacgccagaaattcagaagctgattgatgatcaggtcgctgcccaggtctccggcctgaaaaccaaaaactccgagctgctgggcaccatcaagcagcagaaagacaatctgtctcgctttgacggtatcgacccagatgcggtgcgcggcatcctgcagcgattttctgacgacgaagaggcaaagctgattgccgccgggaaaattgatgaggtgctggataaacgcaccgagcgcctgcgcgctgatgttgataagcagatcaaagcggccaatgaacgcgcggataaagccgaagcgttctccggcaaattccgggatcgcgttctaggcgatgccatccgggcggcagcgtcaaaagctggcgcactggcggaagcatccgatgacctgatcctgcgtgccaaaggcacattccagctcaacgacgaaggcgaggccgtagcagttgatgcaaatggcgacgttctgttcggtaaggacggcaaaaccccactaagcccgcttgaatgggcggagtcgcttaaggagacggccccgcacctgttcccgcgcgctgaaggtaccggcgcgggtggacacaagccaggcggtggtggcagtcagaaacgttcagagatgagcgccagcgataaggcggactatatccgcaagcatggccagcaggccttcctcaaacttacgaaataa

SEQ ID NO: 323 - DNA, 954 bp, Kosakonia cowanii
  source 1..954: mol_type = genomic DNA
atggcaacgactgttaataccgacctggttatttatgacgacctagcgcagaccgcttttcttgagcgtcgtcaggacaatctggaagtgttcaacgcttcttctaacggtgcgattttgctggataacgaacttatcgaaggcgattttcgtaagcgtgctttctataaagttggtggttccattgaatcgcgcaatgtgaactctgtcgataaagtcacaggtaaaaaaatcggtgccggtgaagcggtatccgttaaagcaccgtggaaatacggcccgtacgaaaccacagaagaggcctttaaacgccgtggccgctccgttgatgagttctccgaagtgatcggcgttgatgtcgcagatgccacgctggaaggctacgtgaaatacggcctgaaagcgctgacggctgcaattggtgctaacgccgacatggtcgtaaccgccgatattgagaccgacggtaaaaagaccctgacgcgcggcctgcgtaagtacggcgacaagttcaaccgtgtggtgctcttcgtgatgcactctgccacctacttcgacattgttgatgaggcgattgccaacaaaatctacgaagaagcgggcgtggtggtttacggcgggcagcctggcacgctgggtaaacctgtgctggtgaccgacaccatggacgctgatgcgatccttgggctggtagctggagcggttaccgtcaccgagtctcaggcaccgggcttccgttcctacgatatcaacgatcaggaaaaccttgcggttggctatcgcgctgaaggcgtggtgaacgttgatctgctgggctacagctgggataccgccaaaggtgataaccctgacctgaccgccatcggcactgcgggcaactggaagaaacacttcaccagcaacaaatctacggcaggcgtgctgattaaactggaatccgcagtgggggaataa

SEQ ID NO: 324 - DNA, 483 bp, Kosakonia cowanii
  source 1..483: mol_type = genomic DNA
atgatcattaccgatatcacttcaccggccatgaacagctatgcaggcgagggggatttgaaagcctttgccgatctgcgcgatatcacgctgccggaaaagatcgcgccattgctcatccgggcgatggattaccttgaggggctggactgggccggctggcgaagcgaaccaaagcagccgctggcgtggccgcgtgcgggcatcgaactggacggatacgaactgcccgacggagaggtaccgcgtctggttgttactgcgcaatgcatgctggcggtcgaggcgatggatggcgatctgctgggcagtgtgcgagaagcagctgtgaagtccgaccgcgtggagggagccgtaaccacgacttatgccgtcgctgacggcgaagtgttcataccgtcttacccggcggtgatggctttgctcggcgagctggctggtggtcgtggctatgcagtaaacgcttttgcggagcgtgcgtaa

SEQ ID NO: 325 - DNA, 609 bp, Kosakonia cowanii
  source 1..609: mol_type = genomic DNA
atggcagataaccaggcgtttatggtgtccattaatgcgttcgtcagccaggcaaaggagcgacaggaggaagtggtgcgggtggtcggcatcaaaatcctggcgcggctggtgcagatgtcgcctgtcggcaatccagagctttgggcggtgaaccagacggcggcggcctataacgcggcggtctccgagcataacagtctgctgcggcaaaacccggacaacctgactaaagcaggccggctgcggccaggccgtaaagttaaggacggcatggacctgaaagcgccgccgggctatacgggcgggcgttttcgcggtaactggcaggtgtcgtttgacgcgcgcactaccgacgaaacagggcgggttgataaagctggccatctgacgatgactgccggaaatgtcacactgggcctgtttaaagtcggtgtgcgcgatatctacttctgcaataacgtcccgtactcttaccgtctggagatggggcattccagccaggcgcccggcggcatggtgcgcatcaccgccgccgagttccagcggtatttcagccaggcagtcagcgaggttaaaaatgataccggacatcacaacggcgcttga

SEQ ID NO: 326 - DNA, 411 bp, Kosakonia cowanii
  source 1..411: mol_type = genomic DNA
atgataccggacatcacaacggcgcttgagtccatgctgggtctgtgggcagatggcgagggcgtgcgggtgtcatgggataacattcagttcgacccgcctggcgacgggctgtatctgatctcccatgatatgcccgcgcagccgtacagtattgatatggccgggggctgccgggtctaccccggcgtgtatcaggtcaccgttgtcgcgccagcgggtggcggcaaatcacaggccagagtgctggcccaccgcgtcgccgggttgttcccggagaaccaggagatccccggcgacggctttaccgtctgggtgacatcaccgcccgctatttaccccggcataccggacggcgtgtcctactccatccccgtcagcatcaactaccgggctgatatctcagcttga

SEQ ID NO: 327 - DNA, 678 bp, Kosakonia cowanii
  source 1..678: mol_type = genomic DNA
atgggcttcgcattacctaatggcgccacggtatttgtcggctcgaaactcgccacgcctgtggcagtgacgggcgtcagcaatgccgcaggcgctgtctttaccgttgcaagcggccacggcctcgctgtaggcgatgtggtgctggtttccagtggctgggctctgattgatagcctggtggcgcgcgtcacggcgcagaccaccaccagcgtaacgatcggggtgattaacagcaccgataccaacttcttcccggctggctccggcaccggttacttaagcaaagtagccgagtggactgagatcccgcagatcaccgaagtatcacagtctggcggtgaccagcagtacacgcagatccagttccttgccgatgaccgccagcgcaacctggcgacctacaaggcggccaagtcgcagacctttacggttgcgcatgactccacgctacctatctatgccgtgctgtcagctgctgaccgttctggtgacacgctgccgctgcgcatgtatgtgccaaaggcgaaggaaacgcgttactggtcgggtaagccgtctttcgatccgcagccaaccactgcgccgaatgccgttgagacggtacagccagcgtttgccatccagtcccgcgatatcaccttttacaaagatgctgccccgcaggcagccgcttaa

SEQ ID NO: 328 - DNA, 312 bp, Kosakonia cowanii
  source 1..312: mol_type = genomic DNA
atgaccactaaatttcagctccagcccaaaccgactttcaaagcagacgtcaccattccgcgcgctggcgaagatgatggcgtacttacgtttaccttccgtcataaaccggtcaaagaacttgctgcactcgaagaaatcgagggaaaaactgctatcgacttcctgactgaaatcaccgagtcctgggcactaccggatgagttcagtcgtgaaaatctggagatgctcctggataactacccgggcgcgatgaaagcgatcgtcggcacctattatcgggagttgacaggtaaccgcgaaaaaaactga

SEQ ID NO: 329 - DNA, 3717 bp, Kosakonia cowanii
  source 1..3717: mol_type = genomic DNA
atgtctgatattgcaacaatttcgctccgggtaaataccgccgagctggagcgcgggaacaaggcgctggacgatttccagcagacggccggcagcgcggcaaacaaggccgatgatctgaacagcgttttccgggcgggtgccgacagtcagaaaaaaaacactcagagcctgaaagagcaaaaagaagagttgcaggctcttctgaataaaatcagccctgttaaccgggcaatggatgagctggaaacgctgcaaagcaaactggctggctttcgcggtaagggactgctcggtaatgaggattacagccggtttagcgcagtgctggataccacccgcgataaattatttcaggtcatggaagcagagaccgccgaagggcaggagcgactgaagctggctcaggacacgcaacgtgccgccgcagcgcaggactcgttcctgaaatctcttagcgagcaggctgctaccttccgggcctcaaagtcagatgtgcttgagtatcgggcctccatactgggtttaacgcaagaagccgccccactgattcagcaaatcagggaaagagaactggctatcgccagtgaggctgtgcagacccggattgccgcacaagagcttcgtgagaaacaggccgcagagcgccaggcgttagctgaagcatcccggctgcagtcacaaaatgataacttcgtcgagtctctccgtaatcaggctcaggctatcggtaaatcacgtgctgaggtgcttgagctgaaagcggctcagatgggactgctgcaggaggccggaccgtacatcgctgcgcttaaggcgcaggaggccgcaaccgcacaggaagcagcaaataaaaaagtttctgccatgcaatcccgcatgctcagggatgcgattgcagagctggaggctgcagagcgcgccgaggcatccgagatgcaacgtgcgcagaatattcgcgacacatttgttcggactctcgaagagcaggcgacatcgatcggaaaaacacggatcgaattgctggaaataaaggctgcccaactcggtgtttcccagcaggctgctcctttcatcgaaaagctgcgtgaacaggatgaagcgtggaggaagggcgggatcagcgccgggcagtaccggcaggcattgagaatgttgccagcgcagttcacggatattgccacatctattgctggtggcatgccattgtggatggtgctgatccagcagggcgggcaaatcagtgattcttttggaggtctgggcgggctttttcaatttatcaaggaagaggttcttgggtttaaagaggcaacagacgactcttcagaatcactttcagaaaatgcgaactcactggctgagaatgccgaacatggcaggggtatgctttctttcctgactcctgccaggcttgctgttggtgggcttgtgggggtggcttcacttctggcaattgcatggtacaaaggcacccaggaagccagtgagttcaacaagcagcttatcttaactggaaactatgctggtaaaacagcggggcaacttagtcaactttccaggcaaatagctgatgatgctggtgtgacaataggagaatcatcggcaacactggcgaaaattgttgggtcgggaagatttgatggaaataaacttgaggttgttgccagggcagctgcggccatggaagacgcggttgggcagtcagtagatactacgattgctaatttccagaaactctatgattcaccagtaaaagcatctgttgagctaaacagccagctgcattacttaactgctgcagagtttcagtacattgctgctcttgagcgccgcggtgaaaaggaagaggcagggcaaaaagctgctgatagttacagccgggcagagcagcaacgcagccagcaggttattgacaaccttggccttatcgatcaggtgattcgcgacgtatctgatacatggaaagcatattgggatgcagccttaggtattggcagaaaagaatcgacagctgaacagcttgaggttgtgaggcaaagaattaaagaaatcaccaaccaatcccgtcctggggtttttggtatgggtaatgtcggtgatggtggtgctgcaaaaagggagttggcggcattgcttcagcaagagagagagcttgggtttgttattaaatctcaggaaggtttcaaccagaaaagggctgagtttaataagataaatcaagatggtattgatgcgcagatatcgtttaataaatatttggatgctggaaccactcaagcagaaaaaagagctcttgcacaaaaggatttgaacaaagctattgccgataacgcgaaagcagttaaggcgacgcagggcttgccttatgagcagagagtcaaaccattgactcctgaacaaatatctaaggcccgagctggcatcgagaagctgtataaagatccaaagatccctaaagccaagggcataacggtggccgcaggcgatcgtgccgaagattctgcgcaggctgaacttctggccctccaggctcagctgaaaacccttcaggatcaccgttctgtcaatgacaccatcagtcagcagcgtaaagacctgtatgccgctgaatctaaatttgccgtcctggaagcggccgcgagcacccggcagttatcgaagcaggagaagtctctgctggcgagcaaaaatcaggtgctgcaacttgcgcagcagaaagctcttcttggtgaccagatcaccgctcaggagcaactgaataagcggatggatacggcgcagaagtacgttactcagatggtggagaagcaagccgggcttgcatctggagccacaatgagtgacagacttgccgggcgacaggcatctctgtcccagttacgcagtggctggctcaatgcaggcggtagtctcagcgataacggttataaacaggagttaaaggccgccaacgattactatgcagcagaagacaagctacgtggcgactggatggcaggtgccagaaaaggctgggccgagtaccttgatgcggcaaccaacgtttatggctcaatgcaaagcgtagcgcagtcagccttgggcggtatatcagatatgctgacaaacctggtcactaccggaacggccagtttcaaaagttttgccgcctccatgatgaagatgatcgctgatgttattaatcgactgctggtggcgtacaccgtgcaggccgcaatgggatggatttctgcgggtacctcatcaacaggtagtggtgcaggccagtcttttgctgtcccgtctttccggccagcgtggaacgggggatatatccctgaattcgacaccggcggttacacaggcgatggcggcaaatatcagccaaaaggggtggtacacggcggtgagttcgtctttaccaaagaggccacagctgcaatcggtgtcaataatctttatgcgatgatgcgtggtgctcagggatatgctgaaggtggggttgtcggcaggccgcccatgctggggctcatgtccagttctggtaatgctgcaccggtaattaataccactgtaaacgtcgatgccagtggtaacgcttcggctcaatccagcggctctggagacgctatggggcgcgccatggcggctgaaatacaaaacactgcaaccctggtagttcagaagcacctgaagccgggtggcatgatctacaactttacgaagggtcgttag

SEQ ID NO: 330 - DNA, 351 bp, Kosakonia cowanii
  source 1..351: mol_type = genomic DNA
atggctgttgaaacctataaatggcccgcgcaacttggagcgggcgcaattgaatataaccagacaatccgggcctcacagttcggtgacggttatgagcaggtggctgaaaatggcatcaactctactgccattcaggttccgatgatttatgttggcaaagaggcgttgataaacgaaattcgctcattcctgctggctcataccgttaaggctttcatcatcacgccacccggcgaggagaaggggttgtatcgggtcgtcaaagattctgtgcgtaagaaccagatcagcagcaacgcagcagagcttactttcaccataaagcgcgtctacggcgtctatgcctga

SEQ ID NO: 331 - DNA, 774 bp, Kosakonia cowanii
  source 1..774: mol_type = genomic DNA
atgacagcacttattgatacggcagccatgcttgcacctggcggaaaagtccggctggtagaagtggacgcctcagaattcagtggtggtattcaccgctttcattacagtccttttccgcatactccacgggagattgacgaggcgcagggtgacgaaagcaagctcgggcctaagcctgtagtcttcgatggtgaggtttatgatttctggcctttccagttaacaggcctggctctctcaactgaccaggcggcagagccgtcactcagcgtctcaaaccttgacggccatatctccgcgctatgccttcagtttaaggacatggtgaacgcgaaggtgagcattatcgacacctatacggtgtatctggatgcggtgaattttcccgaccacgttaatcccactgccgatccgactatgttcacgcttcagaccttctggctggataccaaaacgtccgaagatgacgaggtggtgacctgggcgctaagcagcccggcagacctgcaggggctggtaattcccaccagacaaattacttccctctgtgaatgggcgctacgcggacaataccggagcggtgacggttgcacctataacggtacggcttacttcgatgcaaagggaaaccccgtagcggatccggcccttgatgtctgcggcggttgcctgagtgactgtcggaaacgattcggtgccgggcttgcagagccaaacgcggcgatcctcgattttggcggcttcccggcgacggttcttttcacccgttaa

SEQ ID NO: 332 - DNA, 732 bp, Kosakonia cowanii
  source 1..732: mol_type = genomic DNA
atgaacaaaaccataatgtcggctatccgggcgcatgcgctagaggaatccccgcgcgagtgctgcggattcgttatccagtctggccgtcgccagcgctatatccccgtatcgaacacccacgaaaacccgaccgagcatttccgtatcgatggcgagttctgggcgaatgctgaggacatcggtacaattatacgcgttatacattcccaccccggcgacggtgcacggcctataccgtcagacctggatcgtcagcagtgcaacaactccggcgtggtctggggcatttacgcgccggacagcgatgaatacgccgagatcatgcccgaggcggtgccgcttatcggccgcccgtttatcctgggttcacacgactgttgggggcttatcatggactggcacgccacccagggcgtcacgttagacgatttccgcgtcgattatccgtggtgggaaagtcagtacccggacaacttctatttcgataactgggagcaagaaggcttcatcgaatgtgatccggcgcccggttgcatggtcatcatgcaggttgaatccgataagtggaaccatgcgggcattatcactgaagatggtgaactgctccatcatctgtatggccagccctcctgcattaccccctatgcccgcggctatttcaaggacaggacgatgatctgcgttcgccacaggagcctgccagaggagataaagccatggcgcgtttaa

SEQ ID NO: 333 - DNA, 600 bp, Kosakonia cowanii
  source 1..600: mol_type = genomic DNA
atggcgcgtttaaccactattcgcctgtatggcgcgctgggcgcccggttcgggcgagtgcataagctggcggtgcagacatccgccgaagcggtaaaggccctgtgcatcaacttcgacgggctggaagactacctgatgaacgccaaaaagaacggtatgaccttcgccgtgtttcgtggaaagcgcaacataggcgtgcaggatttccaggagctggctggtaaaagtgatattcgtattgcgccggttatggagggggcgaagaaggcgggtatgttccagaccatcctaggggcagtgatggtggttgccggtattatcgtcggcgtggcgaccggctggaccggtgtaggtctcacctttggtgccgggcttatcatgtcaggcgcatcaatgatggccggcggcatttaccagatgctctctccacagcctaaagggctacagggacgcgacgacccagacaacaaaccaagctacgccttcggcggttcggttaacactctggcgatgggtaatccggtggcgccactttggggtgagcgggaaattggcggtgcgatcatcagcgccggcatagtcgcggaagacatttga

SEQ ID NO: 334 - DNA, 3783 bp, Kosakonia cowanii
  source 1..3783: mol_type = genomic DNA
atggaaacgatcactggtgcaaagggtggcagccagaagcagcacacgcctgtagaacagccagatagtgcccagtcgatggcgcgctgccgcatgctgctggcgcttggtgaaggggaattcgccggcggcctggatgcaactcgtatttttctggacgggacgccgctgggcaatgccgacgggacgatgaattttgaaaacgtcacatgggatttccggccgggcacccagacacagaccccgatcccaggctttgccgcggtcgagaatgaaaccagtattggcgtatcgctgacgaaagttgccccctggacccgcgcgctgagtaatatccagattgatgcggtgctcgtgcgcattggcattcccggcctgcagcaacagcaaaataatggcgatatcgttggtacgactgtcaaatatcacgtcgacctggccgtagacggcggcgcgttctcgacggttatgaccaggaccgttaccgagaagctcagctcgctttatgagcttacccaccgcatcaaccttcccaaagccactaccggctggcagattcgcgtggtacgcgatacggacgacagcaccagccagctgctgcagaacaaaacgcaggtgcaggccatcacagaggttattgacgctcgtcttcgttatccgcatacagcactgttgtatgtgtcgttcaatgcaaaatcattcagcgatataccgaaaatctcctgtaaaccgaaggggcgcatcatccgaatcccctcaaactacgatccgatagcccgtacttacagtggcacctgggatggcacgtttaagtggggatggtcgaacaacccggcatggatctggttcgacgttctgaccgaaccacgtttcggccttggccgccgcatcacggcggatatgctggataagtgggagctataccgtatagcccaacgttgcgatcagaaggtgcccgacggaaagggcggcagcggcaccgagccgcgctttatgtttgacgtttatatacagtctcaggccgacgcatggcaggtgatcaaggatatcgccgccgggtttaacgggatgacgttctggggcaacaacatgttcaacgttgtctctgacatgccggcggatacgtcgaaactgcagatcctcaaccgcgctgcagtgatcggcaagccggtctactcaagcggcagtgaaaagacccgtttttccagcgcgctgattaatttcagcgacccggacaatcactatcaggatcgaactacggcggtgatgttcccggacctggtgaaacagttcaagtttaagcagacgcaaatcacagcgatcggctgtacgcgagagagtgaggctcagcggcgtggtggttgggcggtgtattccaactctcttgaccgcattatcaccctacaaactgggcttgatggctatgtctatgtgccgggcacggtgtttgcctttgccgatgaacgcctttctggtcgcgtgtacggtggtcgagttgccgcgtacaacggcgggctgaaggctgtgacaactgatcggggcaccagcgcggttgctggcgacacgctgatgattcgcacacagggcggaaccgtcgaaagtcgggttatccaggctgtaaatggtacgcagcttgtggtgtccacgcccttcaaagcggaccctttaccgaatgcagtatttgttatagacgccgggcagttgagattacagtacttcagagtaactaacctgacgttcaatgatgaggaaaacacctactccatcacaggggcagaatataactcctctaaatatgacgcggttgataataatgcccggctggatacgccaccgatcagcctgattccgaccgggcttgttaatcagccgactaatatccaggtatcaagctttgaatcggtacgacagggccagcgcattactacactgatcgcctcctgggatgcgccacttgataaaaatggcaagcctcaggctgatgttatctcataccaggtgcagtggaagcgtggagataatgaatggattaacgtgccagaaacaggactgcgcaatatagaagtgtccggtatttttgagggtgactatcttgtacgcgtgcgtgccatcaactcaggaggggcttcaagtctgtgggcctcttcactgctgacacacctcaaggggcgcgtgggcgatgttccaaagccggtaggtctgtctgcgtcagaggatgtcgtatttggaatcaatatcacctggggttttccggccgatactgctgatacgctgagcacggagcttcagtacagcctcgctacagacggcacaaacccgatgctgctggcggcagtgccctacccgcagaaactctaccaacagatgggtctcaaggctgggcaggagttttggtaccgggccaggcttgttgaccgtaccggcaatcagtcagcctacaccgactgggtacgcggccagtccagctccgatgtgacggacattacagaggctgtgctcgcgcagatcaaagacacccaactgttcaaggaccttattgaaaacgctgttgaaagcagcgcgaaggttgcggaactggctgaagcggtgcgggagaacgcggccggtctggccgcggctgccgggtcgaataagcagatggcggaagccattatcggtaatgccctggcgatcgcggatgttgttgtccggcagtctgcccagcagggtgctaattccgcgaaatttgagcagctgcgcgaagttatcgccaccgaaacagaggcgcgcgttacggatgtgatccgcctggaggcaaagacggaccagaacgccgccggcatcaccgaagtgcgccaggcgctggcaaacgaaaccgaggctcgggctactgctgtcgatcagcttactgcgcagacggaagagaacaaatccagtgtcacagcgctgacgcagaccgtgacggatctggactcatccactgcctcgcgctttgaggagatttcggcagagatcgcgggcatagacggcagtgacatcagagggggaatacagagcaactccattgcgctgattacctccacgctggcgcaggttaatgatcgcacacgcctcagcgtgcagtacggcgacaacaaggcgggaattgagcgtgttgataacgtgatggccgatgccagccaggctgtcgcggagtcgctcaggtcgttggatgccagttccggcgccggcacggcaaacaccaccgactttgcgaaaaccatggctgatttctcgcaggtttcggcgacaaaaatcaatacgctttcagtgacagtcaacgggcaaagtgcggcgataacgcaggcatcgcaggcagtcgcagatatcagcggcaacctcaatgcgatgtacagcatcaaggtgggggtggatgcgaacgggctccggtacgccgcaggcatgggtatcggcgtgcagaacaccccggcgggcatgcagtcgcaggtgctctttctggccgaccgtttcgccgtaatgacacaggcgggcgggacggtgagcctgccgttcctggtgcagaacgggcagacattcatcaacgaggccttcatcaattacgcgtcgatcaccctcgcacgcgtgggctcctggtattcagcaaattacgtggcggggcagaccgggaccatcatgaaggcggacgggacgtttgaggtcaacggcgcggtatcaggccagggacgcatgcagataacgaataaccgtatcatctcttacgatgcacaaaaccggccggcagccgttatggggcaacgcttataa

SEQ ID NO: 335 - DNA, 954 bp, Kosakonia cowanii
  source 1..954: mol_type = genomic DNA
atgcagatgtttattgcagggaccagctttgacgccatcaacgccatggcggccagttatgttctggatgtcatcaccattaacggcacagggagcaagacctactccctttccggtgtgtcgctgacatatgccattgtgaatgattttatgggagggcagttaacgggcgcgacctacagcgtcagtgtcagcggattaaccgtgtcgtggaacgtcaataatgccgtcacccttattgtgtacggcagcccggtagcgggcacgcagagtgactacttcggcttccagctgttccagtacataaacggggcgaggacggtcaagctggccccgaattatgtgccgctgtgcctgcgccagattatagatgtgccggccggcgcgcgaactgtgcagacgcaggtgccggcgggcaacccggtaatgtgttttcaccgtcacaccggcgaggcgatggatttgtgctggtggaagcccgtcacggccagcgggtatcacgcactgcagttccccactgcggcaagtaaccagaccgggtgccgggtgtatgttttttcgaatattctcgcgaatatcccggactatggcttctttctctaccgggccggacagatggtctggcacagcaactgcctcccgctgcaggtcattcctctgactaacggggatatcaccagcgccacgccgctggcggtgtcatcgagtgtcacgtcacatatcttcgtgcctcaggacccggcatatccgacgggatacagcaatttcatgtgtgcatcagcgggaaaagacggggctgcatataaagtgcaggtcgggaaagtattccagagcacctatatcagcaaccccgatgaaggaaggaggatgagagggtgggcatgcggcggtgtcgggtatatcgacacccggttctatgaccagtactacaaaaatgcgctgggcatcacctga

SEQ ID NO: 336 - DNA, 1260 bp, Kosakonia cowanii
  source 1..1260: mol_type = genomic DNA
atgatttacacaactggctctattgcagtcagcggcaacacgctgaccggcaccggcacgaatttcaccgcagcaggctccctcattcgtaacggctgcacggtgctggcactgaccagcccggcgcaggcctttcaaatctcctcagtagacagcgctaccagactgaccgtgtcacctgcggcatcagtacctgccggtacaaaatttgccatcctgctgagcgacagtctgagcgtggatggcctggcacaggatatcgccgagacgttcagcatgtaccagcggtacatgggcggttttgcggatgtgatgaacggcagcggagatgtgaccatcaccatcaacggtcagcccgttaccgtgcccggtcagaaatcgctggcgaagaagggggctaacgccgacataaccagtctgaacggactgacaacagcgatcacacttgctcagggcggtaccggcgcaaagacggccgcaggagcacgcaccagtctggggctgggaagtatggccacccagagttctgacgcggtaaacataactggtggatccgggacattcaccagccttagctctgacgcggtgaccatcaccggtggaacagcttctcttggcactatcgagacaaaagcgggtgcggagcagccactggtaatacgcaccgctccgagtgggcttggctatatacgtttcagggatgcgtctgaaaatccactggcttatctgggattcggagcgagtggtgcccagcactttattctggcgagcaacatcggagtaaatagcgtcacgctgaatactaccggcgctgtgacagtgaaagcagggggcgctaactacgctttccagacaaacggaaccgctacggggcagctgtggcagagcacatccgatgtcaggatcaagaaggatataaagcccatcaccaatgcgcgtgaggtaatcagtgcaatcagcgggtataccttcaagaagagatacaacctttatgacgtcgccgaaccgctttataccgaagaggcggggatccttgcccaggagcttgagctggtggcgcctgaagccgtctcaaaaaatgatttcggcgcccacgacctcgaaaacaatccgattgatgatttacgcgcggtcaactatgcggggatcacaccctacctgatagagctggcgaagctacatgaggctgagatttcctatttgaagggagaagtggcagagcttaaggcactcgtatcttccctcgcgcagggctcttga

SEQ ID NO: 337 - DNA, 810 bp, Kosakonia cowanii
  source 1..810: mol_type = genomic DNA
atgtctgaacataaagtcgttctgattaccggtgtttcatcaggtattggcagggcggcagccctggccttcaaggccagaggttgtcaggtatttggtaccgtcagggatatcaacagcgcttccccgttgaatggaattgcgctgacagaaatggatgtgcgggatgaacattcggtgcaacaggcaatcgaaagagtgatagccaaagccggacgtattgatgtcctggttaacagcgcgggtgtgtccctggttggggcagttgaggaaacctcagtggaggaagccacccggctgtttgataccaatttctttggtgcattacgtacgaccagagctgtgctgccgcacatgagaagccagaaaagcggacgtatcgtgaacgtcagctccgtgctgggctttctgcctgcgccctttatgggcatttatgcagcctccaaacatgccctggaaggcatgtctgaaacacttgatcatgagctacgtggaagcggcgttcgtgccacgctggttgagccttcttttacaagaacaaaacttgatgtcaactccgctgaaacggcagaaaagatagcgttttataaggatgcacgggaccagactctgggggccatactgaaaaaagtcggtacggcgtccttacccgaggttgtggcagggacaattgtggccgctacacttggcccatggaaaatgcgctataccccaggaggtgaagccacactgcttgccagattacgccgctttgcgccagcaagtatggtcagtaaaggactaagaaaaacctttgaaatgaaagaatag

SEQ ID NO: 338 - DNA, 3111 bp, Kosakonia cowanii
  source 1..3111: mol_type = genomic DNA
atgagtagtggacgtttcaatctttccgcgctcgctgtgcgtgagcgttcagttacgctgtttcttatcctgttaatcaccgttgccggcattctctcgttccttggactggggcgcgcagaagacccaccctttacggttaagcagatgaccatcatttccgcctggcccggagccacagctcaggaaatgcaggaccaggtggccgaaccgctggagaagcgtctccaggaactcaagtggtatgaccgcaccgagacctacacgcgccccggcctggcttttaccatgctctcgttgcaggacagtactccaccttcagaggtccaggaagagttctatcaggcacgtaaaaaactcagcgatgaagcaaggaacctcccagccggggtaattggtccgatggtcaacgatgagttctcggatgtcacatttgcgctctttgcgctgaaagcaaaaggagagccacagcggctactggttcgtgatgccgaatcattacgccagcgcttattgcatgtacccggggtgaaaaaggtcaatattatcggcgagcaggccgagcggatttttgtctcattttctcatgaccgtctggcaacactgggtatctcaccgcaggatatctttgcagccctgaacaatcagaacgtgctgacgcctgccggttcaataaacactcgtggtccgcaggtttttatccgtctggatggggcgtttgacaagctggagaaaattcgtgaaacgcctgttgtatcacagggaaggacgctgaagctttctgatgtcgcgacagttgagcgtggctacgaagatccggcgacctttatggtacgtaaccagagtgagcctgcgctgttgctgggtattgtgatgcgtgagggctggaatggtctggatctgggtaaagcgctggataaggaagccgccagcatcaatgcggatatgcctctcggcatgacctttacgaaagtcaccgatcagtccgttaacatcagctccgccgttgatgagttcatgatcaagttttttgtggcgctgctggtcgttatggtggtctgctttctcagcatgggctggcgcgtgggcgtggttgtcgctgcggctgtgccactgacactggctgtcgtctttgtgatcatggaagcgtcaggtaaaaacttcgaccgtattaccctgggttcgcttatcctcgcgctgggattactggtggatgatgcgatcattgccattgaaatgatggtggtgaagatggaagagggttacgaccgaataaaagcctcggcgtatgcctggagccacaccgccgcgcctatgctggccggtacgctggtcacggccgtcggctttatgcccaacggttttgcacaatccacggcgggtgaatacaccagcaatatgttctggattgtgggaattgccttaatcgcctcctgggttgtggcagtggtctttacgccgtatctcggggtgaaaatgctgccagatatcaaaacggttgaagggggacatgatgctatatacaacacccgacgctataaccgttttcgtcagttgctgacgcgagtgatcgcacgaaaatggctggttgccggtgcagtcgtcgcggtattcaccgttgccgttcttggcatggcactggtaaaaaaacagtttttcccgacgtctgatcggccagaagttcttgtggaagtgcagatgccgtacggcacctctattgaacaaaccagcgcggccgtaatgaaaattgaggactggctcaggcgccagaaagaggcaaaaatcgtgacggcttatatcgggcagggttcaccacgtttctacctcgccatggcaccggaactgcccgatccctcttttgcgaaaatcgttgtcctgaccgacagccaggaagcccgtgaggcgctcaagtttcgtcttcgccaggctgcggctgacgggctggcaccggaggcgcgggttcgcgtgacccaactggtctttggcccgtattcaccctacccggttgcctttcgtgtgacagggccggatccgacggtattacgggacattgcagataaggtgaaaacgctgatgcaggccagcccgttgatgagaacggtcaacacggactggggctcacgcgtgccgacactgcatttcaccctgaatcaggatcggttgcaggcggtggggctgacctcaaactcggtggcccagcagcttcagttcctgctttcgggcgttccggtcactgctgtacgtgaagatatccgttcagtgcaggtcatgggacgtgctgccggcgatatcaggcttgatccagcgaaaatagctgactttaccctggtcggctccgcagggcagcgtatcccgttatcgcaggttggggaggtcgaagtgcggatggaagatcctgttctgcgccgtcgtgatcggatgccaaccattaccgtgcggggtgatatagctgaatcccagcagccgccggatgtctccactgcaattatgaagcaactgcagcccatcatcacaacacttccggatggataccgtattgatgaagctggctcgattgaggagtcagggaaagccaccaaagcgatggcacccttattcccaatcatgatagccatgacgctgctgattattatcctccaggtgcgctcaatgtcggcgatggtgatggtctttatgaccgcaccgctggggctggtgggggtagtgccaaccttactgctcttcaatcagccctttggcatcaatgcgctggttggtctgattgctctgtcagggattttgatgcgtaacacgctgatcctgatcggccagattcaccataacgagcaggaaggtcttgcgccctttcatgcggtcattgaggcaacggtacaacgttccagacccgtactgctcacggcgatggcggccattctggcctttatcccgttaacacattcggtgttctggggaacccttgcctacaccctgatcggcgggacactgggggggaccattattacactggtgttcctgcctgccatgtatgccatctggttccggatcaagagccccgattcaaactcgtcaacggaaaaccgttccgcttctggagggttaaaaaatgtctga

SEQ ID NO: 339 - DNA, 1110 bp, Kosakonia cowanii
  source 1..1110: mol_type = genomic DNA
atgttcaggcttaaacctgccacttttgctgtttgcctgctgccgtttgcacttgtggcctgcggcgacgtttcagataacagtgatcctcgcagcctgccccccctggtcaggtctgccgcagcgatcaacgcaacccattcttcccgcgcttttacaggggtggtggttgcacgtatccaaagtgaccttggtttcagggtacaaggcaaaatcctggaacgtctcgttgataccggtcaggccgtgaaacgaggccagccgttaatgcgtctggaccctgtggatctgagcctgcaggctcaggctcagcaccaggctgtcgctgcagcaaaagcacgcgcccgacagacagcagacgacgaatcgcgatatcgcggtctggtcactaccggagctgtatcggcatccgcttacgatcagattaaagccgcggcagatacggccagggctgatctcagcgccgcccaggcgcaggcgaatgtggcgcaaaacgccatgagctacgcagtcctggtggctgatgatgacggggtggtgatggatacgctggccgaacctggtcaggtggtcagtgccggacaaccggttatcaggcttgccagagccggtcagcgcgaagcggttgtccagttgcctgagacgctacgtccgtccccaggaagcacggcacaggcttctctgtacggcagcgataaacagcctgtttccgcgacactgcggttactctcggatgccgccgatccgttgacgcgcacgttcgaggcacgatatgtgcttaacggcccgttgtctggtgccccactggggtccactgtcaccattcatattgcgcagggcagaacatcgcagccgttgctgcaggtgcctttagccgccgtttttgatgcgggtaaaggcccgggtgtctggagcatttctggaaaccccgccagagtggcatggcgtccagtacaggtcgtcagcctcggggatgatgcggcaagcgtgaccggcagccttaagcctggcgaacaggtcgtggcgctgggggctcatctgctgcatgacggtgagacagtccggctggcgaagcagagcgatgtcagtgtcgccgggagccagccatga

SEQ ID NO: 340 - DNA, 615 bp, Kosakonia cowanii
  source 1..615: mol_type = genomic DNA
atgactaaaaagataaacgatacccccacgcgggggccttccgaccatagtgtccgtgatcaggttgttgacgcagccactgagcatttcggccactacggctacgaaaaaaccactgtctccgatctcgccaaagcgattggtttttcaaaggcttatatctataagttttttgattctaaacaggcaatcggcgaagttatctgctcaaaccggctggcgatgatcatggagattgtcaatgccgcgattgcggatgcaccgacagctgctgagaaaattcggcgattattcagagcattgtcagaatccggtagcgatttgttttttcgtgaccgtaagttgtacgacatcgcggccgttgcggcacgcgataactggccttcagcgcaagcgcatgagcaacgtctgcgtcagcttattgaacagatcattgttgaagggcgtgaggcgggtgagtttgaaagaaaaacgccactggacgagactgctgatgcgatttttatggtcatgcggccttatatcagtccggtgcagctgcaatataatctggaaactgccccggccgcggccgcattactgccctccctgatcctgagaagtttgtccccctga

SEQ ID NO: 341 - DNA, 1467 bp, Kosakonia cowanii
  source 1..1467: mol_type = genomic DNA
atgtttcccctaaatacgcttgcagtggttgtgggtgcctgcatcctgacggggtgtaccgtcggaccggactattatcgccctgaggtacccattgcgaatcattaccacgctcaaccggctttacagcagcccactgcatccgaatcctccagtttttcaatctggtgggagaagtttggcgatccgctgttaagtcggttcgtttcagatgcacttacgcaaaatcttgacctcgcccaggcatccgccaggatgatgcaggcacaagccgggctgggagcggcaacggcggcgctgcttccctcgggaaatatcagcgggcaagctgcacgtgcttatcagtcggttgaaacaccgttgggtcaggtgcttagttcaacgccggattataatcgctacggcaattcgtatgaaatggatctcaatgcaggctgggagttagacctgtttggtggcctgagacgaggtcgtcaggctgccctggccgattatcaggcttctcaggccggtgtagcggcgacacgcctcgctgtcgcagcacagactgcagatatctatatcacactgcgtggattacagtctcgtctggatattgcgaataaacaggtcattacacaacagcaactgctggaaaaagttcagctattgcacagcaaagggctggcatcagaatatcaggttcgccagacagaaggcgcactggcacaggtgaaggcaacggtaccggttctgaacaacggacttgatgccgccatgaatgcgctggacgtcatgctgggcgcgcctccggggacgcatcatgcgcaactggcttcaccgggggctattcctcatacacctgcaatcacctcaatgggcaccccggcggacctgcttcgccgcaggcccgatattattgtggccgagcgtcatctggccgcgtcaagcgcccgtatcggtatggctgtcagcgagtattatccaaagttttcccttaatgctctgcttggcagcgcaacggcagtatcaggcgataatcttttcactgccggtgccagccagtcggcaggtgtgctggggttacgctggcggctttttgactttggccgtattaacgcccagataaagcaggcaaagggccaggaagctgaggctctcgcggcttatcgtctgtcagtcttgcgcgcagcagaagacgtagaaaacgccttctcggcactggtcaatcgccagacgcaggcagccacactgaccagcggtgaaaccgccctggccagcgccagacagtcttctttcgtggcttttcagcaaggtacagccagtctgattgacgtactgcataacgatgaaacgcttctccaggcctcggatgcaagagcgcaggcgcagacagaagctgcccgtgcagccgtggcagcattcagggcgctgggcggtggctggcaatctacattgcctagagaaatggcaaatacgccgggataa

SEQ ID NO: 342 - DNA, 489 bp, Kosakonia cowanii
  source 1..489: mol_type = genomic DNA
atgacacgaattggcattcttggagtaaatgatcttactgaaaccattctggtcgaattgttccgtcttgatccttgcgctcatgtttttctttcatccggcgagcatgagcgcgcaaacctgctggcaaggaagtttccgtgctggattcaggatgacgttcaggcggtaattaatgaagcagatatcattatcattacgacaggaacatcttcctctgaaaacccaccggaaaaaatcgagtaccgaaaatcacaattaatcttttttttggaagcatggccatcaataaacagtcaggtgttttctccccatacggataaaaaaataaattttacaaccagacatgtagcactggctaatatttcaccattcattcatctaacagaagtacagattgatgactatctttttattcttaaagtcctgttggttgcaatgaaacccgtgcatacacttgatgtcaatttcagatcgtcttctgaataa

SEQ ID NO: 343 - DNA, 348 bp, Kosakonia cowanii
  source 1..348: mol_type = genomic DNA
atgaaccttcctgaatctgtcgggccggtgccggttgtccgcacacctaacggctactggtgccaccccgcactgactgcattttaccgtgaccgggactgtgtcccgcaggctgaatatgaccactggctggcggacaacggcctggaggacacgctggtctgtctggatcctgacgaagacacgccggcggcgcaggcatatgcccgcaacgccgatatttcatactggacgccgcccgtacccgcaggtgagggctggtttaccggcgcgatattcgacgacgaggattacggtcccgcctgtatctggctgcgccggcgggaggtgccatgcgacgcaggctga

SEQ ID NO: 344 - DNA, 252 bp, Kosakonia cowanii
  source 1..252: mol_type = genomic DNA
atgaaaataattaacgctgcggcggttgtgctggtttcgttaatggcatcaggctgcgccagcaacacgcccccgctgtgctataacggggcggtagtgatgaaaagccgggtggcggtaccggtattcggcataagaaaaccggtcaccaccaccgaatatctctccggcggcagctttggttatcagtgggttgaacggagtgcttttacggatacatcgtcctgcgacaggctgccgctgacggagtga

SEQ ID NO: 345 - DNA, 201 bp, Kosakonia cowanii
  source 1..201: mol_type = genomic DNA
atgacgttcttcattgtctgggaagcatacacacgaaactggcaactgatgcagaagggctcacgcttcatgagcactgacgatcctgacatcatcgatgttgatctggctgactatgtggcagaaatggccaaagcgcttggtattgaggaaaagtacttcgtcattacctcaatacagcaaatatgcgtgctgaaataa

SEQ ID NO: 346 - DNA, 711 bp, Kosakonia cowanii
  source 1..711: mol_type = genomic DNA
atgcgggacaagacaataagcgcgattctggcgcatgcggcgcaggcgttcccggctgaatgctgcggtgtggtgatccagaagggacgggttgagaagtatgtcgcctgccggaatctggccgcctccccggaggagcagtttgaactgtcaccggaggattacgcggcagccgaagagcagggcacggtggttgccgtggtgcacagccaccccggcgacggtgccacaacgcagccaagtgaactcgacatgctgatgtgcgacgcgaccgaagtgccgtgggtgattgcttcatggcctgaaggcgatatccgcaccatcatgccgcgcggcgatcgcccgctgaccgggcgtcagtttgttctcgggcatgctgactgctggtcccttatccgggattacttccgcactgaacacggtatcgcgctgcccgactacagcgtcgatcgccactggtgggaggagggcgaaaacctctatatggataactggtacgcatgcggtttcagggaattcgacggtccctcccggcccggcgatatggtcattatgcaggtgcaggccagcgtgccaaatcatgccggcgtcctgctggagggcaacatgctgctgcaccacctgtacgggcagctcagccagcgcatgccgtatggcggctattaccgtgaccggaccattaaagttttacggtacaaggacctgatgtga

SEQ ID NO: 347 - DNA, 711 bp, Kosakonia cowanii
  source 1..711: mol_type = genomic DNA
atgcgtcagaaaaccattgatgccattttggcgcatgctgcagctgaatatcctcgtgagtgctgcggcgtggtggcgcagaaaagccgtgttgaacgttattttccgtgccggaatcttgccgcggcgccggaggacaattttgtcctttgcccggaagattacgccgctgctgaggactggggtacggtgatcgccatcgctcacagccaccctgacgccacgacgcagcccagcgaactggataaagcccaatgcgacgcaacgcttctaccctggcatattgtgagctggccggagggggatttacgcaccatccagccccgcggagaacttccgctgctggagcgaccgtttgtactcggtcacttcgactgctgggggctggtgatgagctattaccggcagacgcacgatattgagctgcatgattaccgggtggattatccctggtgggaaaacaactatccggacaacttttacgaggaatgctggtacgagtgcggcttccgtgaatttgatgggccaccaaaacccggcgatatggtgatcatgcaggttcaggcggataagtggaatcacgcggggatcctgcttgaaggaaacttgctgcttcaccatctttacggacatctgagccagcgcgtgccgtacggtggttactggcaggaaagaacaatgaagattcttcgctatacatctctgtgctaa

SEQ ID NO: 348 - DNA, 339 bp, Kosakonia cowanii
  source 1..339: mol_type = genomic DNA
atggcagttgagaccttctcctggtgcccgaaggtggcggcgcaggctgataccagtttccgcacccgcaaagcgcagttcggggataattatgcacaggtggccggggacggcatcaacccggtcacaccgcaatggagcgtgagttttaccggggatgaagcgtatgttctggccataaaggcgtttctgaagcggcatgccggctggaagtccttcatctggaaaccgcccctggagtccgcggggttatggcgatctgaatccctccagatagccacccacggcaacgacaaatacaccctcagcaccacattcattcaggcataccatccatga

SEQ ID NO: 349 - DNA, 339 bp, Kosakonia cowanii
  source 1..339: mol_type = genomic DNA
atggcaattgaggaatttacatggtgtccgcgcattaatgcgcagcaggaggtgacattccggacgcgcactgcgcagtttggcgacgcctataagcaggtgtcaggggacggacttaatcccagatcgcagaaatggacgatggagtttaccggcgatgaagcctacatcgcagctatcaaggcttttctggatcgccatggcggcacccggtcattttcgtggcgcccgccgcttgagccgctggggctctaccgttgcaacacctacacgccgacgccgcttggcgccagaaaatataacctctccgcaacttttgaacaggcgtttgcaccatga

SEQ ID NO: 350 - DNA, 3492 bp, Kosakonia cowanii
  source 1..3492: mol_type = genomic DNA
atggcaacgcttcgcgaacttattataaaaatttctgctgactccagctcatttcagagtgagatcacccgcgcctctcgcatgggctcagactattacagaacaatgcaggcgggaggccgccaggcggcggcagccgctaaagaaagtgaaagggcgttatctgatctcactagtggttttgcctcagcaggtaaagctgccgctgccgccgctgcggcttttgctaccgggaagctggtgcagattgcggacgaatggaactccgtgaatgctcgccttcaacaagcttcgtcttcggctgatgattttgcgacatcgcaacgtcagcttatggagatcagtcagcgaaccggtacagcgttctctgataatgcctctctttttgcacgggccgcggcatcaatgcgcgagtatggctacagctcggaagaagtgctcaaaattaccgaagccgtttcaaccgggctgaagctttcaggcgccagcacgcaggagtcaagttctgtcattacgcagtttagccaggcacttgctcagggcgtattgcgtggtgaagagtttaatgcagtcaacgaggcgggtgatcgtgtgatccgcgcccttgctacaggcatgggtgttgcgcgtaaagacctcaagagtatggccgaccagggcaagcttacgatcgataaggttgtgccagcgctaatgagccagcttggggcgttacaggttgagtttgcaacgatgccgcagactgtctccggctcattgcaaaaggtcactaactcgttcatgggatgggttggcggtgttaacgcagcaacaggcgctacggatgcgctgtcaggtggtcttgatggtgttgccagtacgcttgactcatttacatcatcggcggtcagtggtgccctgagtgatgtggctgacaacatgtcaatcatcaccactgtcgcaggcgccctagttggcgttgggttggctaagtacctcggtggtattgttaccagcgccacgagtgctacaggtgctttgatctctgctgcgaaatcagaagttgccctcgcagtagcgcaagacagggcagcccagtcagccgtggcagcttccagagccgatgtttatcgcgcccagcaagccttacaaagagccaagggcgctgatattcaggctgctcagcaggaaaaagtagcagccgcagaggcaaaggtaacagcagctcaggccaggctcacgacggctcttgccggaggaacagcaacagagaaagtcagagccagagcagcgcttgagcgtgctcaagcaggtctggcagctgctaagaatgcggatgttcaggcagttgctgaacgacgactggcacaggcagaggccgcgcgtgacaggaacctggctaaccgcgtctcgacccaaagtaatttaaacagtgtcaccgctgtcggatcgcggctcatgagtagtgctctgggtattatcggtggcattccagggctggtgatgcttggcgcaggggcgtggtatgcggcatatcaaaatcaggagcaagcccgtcggtctgcacaggaatacggcagaacaattgatgaagtaagccagaagatcaagcaaatgtctttgcctgaagcttctgataatgcagataagtctaaaaaggcccttgatgagcagaacaggcttatcgatgagcaaaaaagcaaagttgaaagcctgaaaaagcagattgccggctcccagtatctcatcagcaatcccggcccgatgaccaaaggtggtttcatgataaaccaccttacttcccttaataccgtgaccgacgaattgtctacagctacaggtcagctttccgtcgaacaagaaagactcgcacaaatgcagggaaaagcggcctcaattcaaaagatccttgaggacattgagcgtcgccggaatgatggaattcgtgaacaggcctggcgtcagaatgctgcctatcagtccctgctgatgatgaacggtcagcatgaaaaatttaaccagttgctcggactcggcaatcaattactgatggcccgtcaggggatgacactggcaccccttcgcgtacctcaggctgaggcctcgcaggcacagacggaggcgctcgaaaaaagccggcgcgatctggccctgtcccgcctgaaaggcgaggcaaaagagcgcgcccggcttggctatgctgctgatgaactcggcctgacggctgatccgcaattccagaccaaccggcttgagtacatcaataacgggcttgaagagtggcgcaataacgaggccaacaaaaagcagcccaaagggccaaagacggacgaagaaaaggccgctgatgcttataagaggatgatcaagcagcagaaggagcagatcgcccttcagggccagagcaccgaacttgccagggtgaaataccaggtggtcgaaggtgaactgtccaccctggacaaggcgcagaaggctgaactgatgcgcaacgctgcgttaatcgatcgggtcaaactgcgtgagcagctgcgtaattacgaggcaaatcttgctgacagcaacgccagcgcccgggcggcgaatgatgcgcagctcatcggatacggtcagggcacccggttccgtgagcggatgcaggagcagtttaatatccgcaaggagtttgagcagaagaataccgatctgctccggcagcggcaggccggggatattgacgaaactttctaccagcaggggctggcactcaacaaacgctatctggaagagcgactgcgcgaccagcatgggtattacaccgcttccgatgcgcagcgcggtgactggttaacaggcatgtcagagggctatgcgaactgggtggacgaggcaacggactacgccggtatggctgcagacgggatgaagcaggcgatgggcggggcggtgaccaccattaccgatatgctcaacggcaacctcgacagctggaaggactggggcatgaacgtgctgaaaattattgagaccgttctcgttaatatgatggtggcgaatgccgcgagttctctcggctcactcttcagctttggtgcctcatccgccgcaacagccagcagcgggacggccatacagagcgccgcgtcaaacttcaccttcaacgccaaaggtggcgtatacgattccccctccctcagtgcctacagcggtggtgtctaccagaccccgcagctgtttgcctttgcgaaaggagccggggtgtttggcgaggccggtccggaggcgattatgccgctcacgcgcgcggcggatggttcgctcggtgttcgcgcagtcggcgcaccgcagttttccggcggaggtccgtccgtgtcgtttggcgatatcaacatcaatggcggtgcgcagtcgacggcagggcagggagcagccgcaactgccggcaggcaactcaaggatgcaatcgtgacggtgattaatgagcaggccagcatgccgggctcgcctttgtggcggcttttaaaaggagcgtga

SEQ ID NO: 351 - DNA, 3516 bp, Kosakonia cowanii
  source 1..3516: mol_type = genomic DNA
atggctacgctgcgcgaactcatcatcaagatctcggcaaattcccagtcatttcagaccgagattgcccgtgcgtcgcggatggggcaggactattaccgtgtcatgcaaaacggtgggcgccaggctgccgctgctgcgcgtgaaagcgagagagcgctgtcagatttaaccagtggttttgcgtccgccggcagggctgctgcggcggctactgccgcttttgccaccgggaaaattgttcagatcgctgatgaatggacgtcagtgaatgcgcggttacgtcaggcttccgcatcctctgacgacttcgccaactctcagcgccggctaatgtctatcagccaggctaccggtaccgcttttaccgataatgccaacctgttttcgcgcgctgcagcctctatgcgtgaattcggttacagctctgatgaagtgctgaaagtcacggaagctgtcagtacgggtcttaagctgtccggtgccagtaccgctgaagccggttcggtgatcaaccagttcagtcaggcactggcgcagggcgtgttacgtggagaggaatttaatactgtcaacgagagtggcgaccgcgttatcagggcgcttgcggccggcatgggcgttgcgcgtaaagatctcaaatcaatggcagatcagggaaaactgaccatcgacgttgttgtccctgccatcatcagtcagctcggtacgctccagggcgagttcgccgcgatgccgcagacggtttccggatcggttgaaaaagttgcgaactcctttatggcctgggtgggcggtatcagccaggccaccggcgccacggatatgttatccggcggtcttgatggtcttgctgccacgctcgacagcctgacctcatccgctgttaccggtgcgctgaatgatgtcgccgacaatatggcgacgatcaccaccgttgccggggctctggtcggcgtgggacttgctaaataccttggcggtattgttaccagtgccactggcgccaccacctctcttatcgcggcagcaaaatcagaagttgcactggccgtggcacaggacagagcggcacagtcttctgtggccgcggcacgcgccgacgtgtatcgcgcgcagcaggcactacagcgcgcaaaaagcgctgatgtccaggcggcccagcaggagcgagtcgccgcggcagaagcgaaagtgacagcggcacagacccggctgacggcagcacaggccagcggcacagcaacggagaaagtaaaggcgcgttccgcactggagcgtgcgcaggcggcacttgttgccgctaaaagcactgatgcccaggcagtggctgaacgccgtctggccgctgcacagacaggactcaacaacaatatcgcaaaccgcgtgaccgctcagaataacctgaacggcgtcaccagcgtcggcacccgacttcttggcggcgccatggggctgattggtggcattcccggactggtaatgctcggtgccggcgcatggtacgcgatgtaccagaatcaggagcaggccagacaatccgcccaggaatacgcaaaaaccattgatgaggtcagccggaaaacacgtgcaatgactctgcccgaagcagaggataaccgcgggaaaacagtccaggcgctcgtggagcagaaccggctgattgaggagcaggaaaaagccattgctgcagttaaaaggcagcttgatgacctgaataaaacgcgcgggcagccggggatgaccggtgataacgatctcaacatcgttaaagcgatggggcttctgaccgatcaactgaccgtcgaagaagataaactcaaccagatgcgcgagaaatcgcgcggtattcagcaggctctcgaagcgattgagcgtcgcagaaatgatttaattcgtgagcatgcctggcggcagaatgcgcaataccagtctctgctgatgatgaacgggcaatatgaggacttcaacaggctgctggggcttggaaatcagttactggcttcgcgcagccagttgattaaagcgccttttgccatcccgcaggcgccggtatcggataatgataaacaggcgctgctacaaaaacagcagtcggcggagctggccgggttaaccggtctggataaaattaaccgtcaggtcgattttgaactacagaaaatgggcaagaccggccctgagaactcgaaattcgccgcgggatggcggcaggctgcaattgatgagtacaacaaatcccagaaccttgctgctgcacaaaaggcgcaggccgaggccacacgcgacgccggtaaggcacagcgggaagcagcgcaaactgctgagcagtacagccgtaaaatcgccgatctcagtgtcgcaattgaagtgcagaaagtccgggctaaagagggtgaacaggcagcagaactctacgcatccgctaaccagaccggggcaaaatggacggaagagcagcgcaccgcgatacgcgctcagtctgctgaactggccagactgactcagcttgcagacgatcatgtccgcaagatccgtgaacaggctgatgcgctgaaagaccttcgggaggcgagccgtaaattcagtgacgaggctgaatttgcagtaaaaacggccggaatgggggatcgtcaaaagcaacggtatgaagaaacacagcaggttgagcgcgtctattcaaaaactgatcagagtgctcaggctttccatgaaaaagaaatggcgctggccagcctcgataaaaaataccgggaaattgcggcgtctgagtcgaactggcgaaacggtgtatcgcgcggctatgccagctggttcgatgagatgaccaacatcgcgggaaccgtctctgatggtgtgaaatcgtcgcttgatggcgcattcagtaacgtcacgtccatgctcgagggaaacaaggtctcctggaaatcctggggcatttccgtcctgcagatcattgaaaaagttgcacttcagatggcggttgtcagtgctatgggcagcgtttcatcatcttccggactgattggatcgcttgtgggtggcgttaccagctttttctcgggaggcggtgcaggtgcttcgcctgcaggtcagtcgttcgcagtaccttctttcactccaaatgcgctgggtggcgtatacgattcgccatccctgagcacctacagtaatggcatctataactccccacagttcttcgcttttgctcagggggccggggtgtttgctgaagccgggccggaggccatcatgccgctcacacgtgcatctgatggttctctgggtgttcgcgccgtcggttcaggcgtgaataacgtgtcgaccgctgccggtgctgcgccccaggtaaatgtctatatcacggacagcggcaacaagagcacggcgacgccgggttacgaacagcttgggcgggaagcgggtgcgtttatcgatcgccgctaccgggagcttatcggacgtgatctggcacctggcggcaatatctggaatctggctaaaggtaatcgctga

SEQ ID NO: 352 - DNA, 3510 bp, Kosakonia cowanii
  source 1..3510: mol_type = genomic DNA
atgccgccagcaggcggctttttttatgggcgcgatatgacgaacacagctattaaagggcggaaaggtggtggtaccaagacccgcacgccagtggaagccccggacagtattcagtccatagccagagccaaaattcttgtcgcgctcggcgaaggggagttcgccggcgggctggacgggcggagcatttttctcggcgacgcgtcatcgtataccccgctgcagaatgccgacggcagttacaacttcaacaacgtaaaatatgagttccgctccggtactcaggatcagagctatattcagggatttccgggcgttgagaatgagctgcaggtcgcctacgaactcaaagctgccgtgccgtatgtccgctctgtctccaatacccagctttcagcactgcgcatccgcctgggctggccctcgctgctgaaccagaaagacaacggcgataaggtgggtacgcgcgttgagtatgccatcgacctgtctgtcgacggcggcgcatatgagacggtggtcgacggcgctgtcgatgacaagaccaccaccctttatgagcgcagtcaccgtatcgacctgccaaaagccacaaccggctggcaggtgcgcgtgcgccggataacgcctgattcaacgacagtgaatattgtggacagcatgcgcgtcgaggctgtcaccgaaatcattgatgcaaagctgcgttatcccaatacggcgttgctctacattgaatttgatgcgaaacagttcccgaacggcattcctcaggtggtgtgcaatccgaaggggcgcattattcgcgtgcctgatacctacgatcctgacacgcgcacctattccggcacctgggaaggcgggtttaaatgggcgtggaccgataaccctgcgtggatttattacgacatcgtgctgaatgagcggttcgggcttggtcagaggattgatgcgacccagattgataaatgggagctgtaccgcatcgcgcagtactgcgatcagccggtaccggatggcaaaggcggcagcggcacggaaccgcgttttcgctgcaacgtctacattcaggaacgcaatgacgcctggacggtgctgcgcgaccttgccggtatcttccgcggcatgacctactggggcgacaacaagctgtatgtgctggccgatatgccccgcgatctctggcacatctataaccatgccagtgtggtcgacggtaaatttaccttcgccgatccgagcgaaaccacgcgcaacactgccgcgctggtgaactggtccgatccggcgaatcactacaaagacacgcccgaagtcgtttatgacaacgatctggcgatgcgcttcgattacagccagctcgaaatgacggccatcggctgcacccgacagtcagaggcaaaccggcgcgggcgctgggcgctgctcaccaacggcatcggtgaggtggtgaccttcagcacgggtatggatgttccccctgtcggtgaggtgattggcgtggccgcgaacgagctggccggcagggtgattggcggcagggtaagcgcggtcagcggtcgtaatatcacgctcgaccgtgccgcggatgtcagcgccggcaatcggctttttatcaacctgccctcaggtgtggcgcagacacggaccgtgcaggcggttaacggcaatattgtcacggtcaccactacctacagtgaaacgcctgaggcggagtgctgctggggtgtggatgctgacgatctgtttatcgcgctctttcgcgttaccggcacccgcgacaacgatgacggcactttcgaggtgacaggcgcgacgtacagcccggatatttacgccgcggtcgataccggcgcccggctcgatgaaaggccggtcagcgtgatcccgcccggcgtgcaggcaccgccagaaaacatcgtcatcgacagctattcgacggtcagccagaacatagcgatcaccaccatgcgtgtggcctgggattctgtaaaaggcgcaatcgcctacgaagccgagtggcggcgcgacagcggcaactgggtgagcgtgccccgcacgtcctctcttggtttcgaggtgccgggtatctatgccgggcgttatctggtgcgggtgcgggctgtgaacgccagcgatgtttcgtccatatgggcgacatcagctgaagtcacgctcaccgggaaagtgggcaatccgccgaagccggtgggttttaccgcctcggaaaccgttgtgtttggtatcgagctgaactggggcttcccggcaaacacggacgacacgctgaaaacggagatccagtacagcctgaccggaaccgacgacgatgccatgctgctggccgacgtgccttacccgctgcgcaagtatcagcagatggggctcagggccgggcaggttttctggtaccgcgcgcagctggtggaccggaccggtaacgaatccggttacacagactggatccgcggtcagtccagctccgatgtgacagacattacagaggcggtgctcgcgcagatcaaggacaccgacctgttcaaggacctcatcgagaacgccgtggagagcagccaggcggtcgcggatctggctgaggcagttaagcagaacgccgatgacctggctgcggcggcaggcgcaaaccgccagacggcagaagccattatcggtaatgccctggcgatcgcggatgtggtggtgcgtcagtcagcccaacagggcgctaactcggcgcggttcgaacaactgcgtgaggtgatcgccaccgaaaccgaagcgcgcgttaccgatgtgatccgcctggaggcaaagacagatcagaacgccgccggtattaccgaagtgcgccaggcgctggcaaatgaaaccgaggcacgggctacagctgtcgatcagcttaccgcgcagacggaggagaacaaggccagtgtcaccgcgctgacgcagaccgtgacggatctggactcgtccacagcctcgcgctttgaggagatttcggcagaaatagcgggtattgatggcagcgatatcagagggggaatacagagcaattccattgcgctgatcaccagtacgctggcgcaggtcagtcagtccacccgaatgagcgtgcagtacggtgctaacgccgcaggtatccagcgtgttgacactgttatggcagatgccagccaggccgttgccgagtcgctcagaacgctggatgccagcgccggcgacggcacggcaaatgtcactgactttgcgaaaacgatggcggatttttcgcaggtctctgcgacaaaaatcaactccctttcagtgacggtaaatggccagcaggcggcaatcgtccagaatgcccaggtgtcggccgacatcaacaacaacctgaatgcgatgtacagcatcaaggtgggcgttgatgccaatggccgccagtacgctgctggcatggggatcggtgtgcagaactcaccttctggcatgcagtcgcagatcctctttctggcggatcggttcgctgtc

SEQ ID NO: 353 - DNA, 3471 bp, Kosakonia cowanii
  source 1..3471: mol_type = genomic DNA
atggcacacgctaccgtaatcagaggaagcaagggcggcggttcaaaatcccgcacgcctaccgaacagcctgacgatcttcagtctgttgcaaaggctaaaattttgatcgcgctgggggagggtgaattctcaggccagctaacaggcaaggacatttatcttgatggtaccgcgattgaaaacgctgacggcactcagaactttagcggtgttacgtgggagtttcgtccgggtacccaggcgcagaattacattcagggaattcccggtaccgaaaacgaaatcaacgtcggtacccaggtctccagcgcagtagcgtggactcgcacgtttaccaatacccagttgtcagccgttcgcctgcgcctgaagtggccctcgctttttaaacaggaggacgacggcgatctggtcggtcactcagttaattatgcaattgacctgcagaccgacggcggcacatggcagacattacttaataccagcgtgaccggtaaaaccacgtccggttacgagcgcagccaccgcatcgatttacctcaggcaggtagtacctggacaattcgcctccgcaaaattacccctgatgcgaacagcgccaagatcggcgatacgatgacgctgctgagctttactgaggtgattgacgcaaagctgcgttatccaaataccgcgctgctgtacattgaatttgactcaagccagttcaacggctctatcccgcagatttcctgcgagccacgcgggcgcgttatccgcgttccagatacttatgatccggagacacgcgcctataacggcatctggcagggagctttcaaatgggcatggacagataatcccgcgtggattttttatgatctggttgtgaccgatcgctttggcctgggtcaacggcttactgcggcgaacatcgataaatggacgctctaccagattgcccagtattgcgatcagcaggttccagacggaaagggcgggagtggtactgagccccgctacacctgtaatgtttacatccaggaccgaaatgaggcctatacggttctgcgtgactttgccgccatattcagaggtatgacctactggggcggtgatcagatcgttgcgctggctgacatgccgcgtgatgtggattacagctatacccgagccaacgtagtgggcggacggtttgcgtattcgggcagcacaacgaaaagccgctacaccaccgcgctggtttcatggtcagatcctggcaacgcctacgcagacgcgatggaaccggtatttgagcaggcactggttgcgcggtacggcttcaatcagctggaactgacagccatcggttgtacccgtcaatcagaagcgaaccgtaaggggcgctggggtattctcaccaataacaaagatcgtgtggtctccttcgacgttggtctcgacggtaacatcccgcaacctggctacatcatcgccgtggccgacgaaatgctgtctggcaaggttatgggtgggcgcatcagcgccgtcaacggcagggttatcactctggatcgtaaaccagatgccatcgccggcggccgtcttatcctgaatttaccttccggggcttctcagatccgtaccattcagtcggtcaacggaaatcaagttacagtcacgacggcttatagcgaaacgccagaacctgaggctgtctgggttgttgagtctgacgaactttacgcgcagcagtatcgcgttgtcagtgtctccgataacgatgatggcactttctcaatttctggtgcctggcacgatccggataaatattcccgcatcgataccggagcggtcattgaccagcgaccagtgagcgtcatccctcctggtacccagacaccgccggctaacatcgtgatcagctccttctcggtggttcagcaaaatatcagcgtggaaaccatgcgcgtgagctgggaccaggcgcagaacgctatcgcctacgaggctcagtggcgccgtaacgatgggaactgggttaacgtgccgcgcagctccacgacctcattcgacgtgccgggtatctatgccggtagctatctggttcgtgtgcgcgccatcaatgccgccgaaatttcctccgggtggggctattcagaagagaaaacgctcaccgggaaagtgggcaatccgccgaagccggtgggctttaccgcctcggaaactgttgtgtttggtgtcgagctgaactggggattcccggcgaacacggacgacacgctgaagacggaaattcagtacagcctgaccggtaccgaagatgatgcaatgttgctggccgacgtgccttacccgctgcgcaagtatcagcagatggggctcaaagccgggcagattttctggtaccgcgcgcagctggtggaccggaccggtaacgaatccggttataccgactgggtccgcggccagtccagctccgatgtgacggacattacagaggcggtgctcgcgcagatcaaggacaccgacctgttcaaagacctcatcgagaacgctgtggacagcagtgcgaaggttgcggaactggccgaggcagtgaagcagaacgccgacggcctggctgcggcggccggggcaaaccgccagacggcagaagccattatcggcaatgccctggcgatcgcggatgtggtggtacgtcagtcagcccagcagggcgctaactcggcgcggttcgaacagctgcgcgaggttatcgccaccgaaaccgaagcgcgcgttaccgatgtgatccgcctggaggcaaagacagagcagaacgccgccggtattaccgaagtgcgccaggcgctggctactgaggaggaagcgcgcgcaacggcggtagatgagctgactgcgcggacggataaaaacgcagcaaatgtcaccgtgctgacacagaccgtgacggatctggactcctcgaccgcctcgcgctttgaggagatttcagcagaaatagcgggcattgatggcagtgacatcagagggggaatacagagcaattccattgcgctgatcaccaacacgctggcgcaggtcagtcagtccacccgaatgagcgtgcagtacggcgctaacgccgcaggtatccagcgcgttgccaacgtgatggcggacgccagccaggccgttgccgagtcgctcaggacgctggatgccagcgcgggcggcggcacggcaaatgccactgattttgcgaagaccatggctgatttttcgcaggtttccgcgaccagaatcaactccctgtcagtgacggtaaacggtcagcaggcggcgattgtccagaatgctcaggtttcggccgacatcaacaataacctgaatgcgatgtacagcatcaaggtgggcgttgatgccaatggccgccagtacgctgctggcatggggatcggtgtgcagaactcaccttctggcatgcagtcgcagatcctctttctggcggatcggttcgctgtc

SEQ ID NO: 354 - DNA, 759 bp, Kosakonia cowanii
  source 1..759: mol_type = genomic DNA
atgagcatttcatctgatgtccagaaactggagccgggcagccgtgtgcgccttatcgaggtcgacggccaggcgttcggcgccggcattctgcggtttcataacgaaaccatccctcacacagaggccgagatcactgccgcgggcggcgatgcgtcaaagcttccgccgaagtctgtctggtggcaggggctggagtacggtgcctggccctttgaactgaccggcctgtccgtcagcagcgacgggcagagcgcccgcccgaccctgagcgtgtcaaatatcagcggcacgataggcgcgctctgtcgtcgctttcagggaatggcgaaggcaaaagtgatcatccacgacacatttgcccattaccttgatgcccgtaatttcgccggcggtaatcctgccgctaacccgacagaggagcgcaggcaggtctattacatcgaccgtaaatccggttcggatgatgaaaccgttgagtttgagctgtccagcccggcagatctgcgggggcagcttattcccacgcgccagatccagcccatgtgcacctggtgcatgcgcggctggtacaaaaccgggaacggctgtacctatgccgggcagaatggctggtttgataaggacggtaacccggtcgacgatccttcgaaagacgtgtgttcaggtctgctgtccaccgggtgcaagacgcgatttggtgccgaaaacgaagtcgattttggcggctttccgggtgcgtcacttctgagggggtaa

SEQ ID NO: 355 - DNA, 756 bp, Kosakonia cowanii
  source 1..756: mol_type = genomic DNA
atgagtttaaacagtgattaccagaaacttgaaccgggtgatgaggtcaggctttttgaggtcgacggcacggcctttggtacaggcgaagttcttcgttttcacagctacagcctcgcgcataccgaggcagaaattgccgctgccggcgggaatgaaaataaactgccggctaaatcagtctggtggcagggagaagagtataaagcgtggccctgcaagattgagggcattgagtcatctaccagcgggagcagcgcgcagcctaaattatcagtagcgaacctcgacagttccatcacagccctgtgtctggcctatgacgatatgttgcaggcgaaagtgactatccacgataccctgggcaagtaccttgatgcgaaaaacttcgctgagggcaacccttcatccgatccgacacaggaaaagctgaaggttttctatatcgatgcaaagagcagcgaaaccaatgaggtggtcgagtttacgctctccagcccgatggatctgcaggggctgatgataccgacgcgccagctccattctctgtgcacctggtgcatccggaataagtaccgcaccggcgacggatgtgactatgccggtacgcgctatttcgacaaaaacaacaatcccgtcagcgatacgtcgctggatgagtgcagcggtacactgacggcctgcaaactccggttcggcgaaaataacgaactctcgtttggtggcttcccgggcacgtcgttgatcaggagctga

SEQ ID NO: 356 - DNA, 600 bp, Kosakonia cowanii
  source 1..600: mol_type = genomic DNA
atggaaaaacggactgttatcaaactgagcggatcgatggcgcagcgcttcgggcgcacgcaccgccgggtactgtcctctgccagcgaggttttcagggcgctgtccagcacggtggacggctttgaggattatcttcgcgaggcgcgcgccagggggctcgatttcgtcatcttccgcgatcgccgcaacatcagccaggaagaattttcgcttctcggccccggcgatgagctgcgcatcattccggtgatccgcggcagcaagcgtgccggcatcttccaggcggtgctcggagctgccctgattgccgggggtatcgcccttggccctgccggagccgggctcatcggtaaaggagtcgcgctgaatgttgcgctggtcggcgcatccatggcgctgggtggcgtggtgcagctgctgtcgccgcaggtggcggggatgaggatgcggcaggatccggataacaagccttcctatgcattcggcggcccggtcaacaccaccgccagcggcaacccggtacctcttctctatggccagcgtgagatcgggggcgctatcatttcagccggcatttacgcagaagatcagcaataa

SEQ ID NO: 357 - DNA, 603 bp, Kosakonia cowanii
  source 1..603: mol_type = genomic DNA
atgaacgaaataatgactcaaattgaattgggtggagtattaggaaagatcttcgggaaaaaacatcaacgtataatttcaacgccacttgaagctgggaaagcgttagctgcaaccatcaaaggttttgaacaatacatgataagcagtaagagtcgaggtttaacctatgcgatgtttaaagataaaaaaaacataggaatagatgatctaggttatccggttacaggggaagtaattagaattgtccctgttattattggaagcaaaaaggcaggtttactgcaaactatcctaggtgttgtgattgtggccgctgctgttatttccggacccgtgggtttggctgcattatcaggggctcaagcgtttagcattggagctataggtgcttcgatggctttaggtggagttatccaaatgctctctcctcagcccactggtttagccagtaaacagagcgcagataaccgcgcttcctacgctttcggtggagttacaaacactacagcacagggctacccggtcccgctcctttatggccgccgccgtataggcggggcgattatttccgccggaatttacgtcgaagatcagcagtaa

SEQ ID NO: 358 - DNA, 1146 bp, Kosakonia cowanii
  source 1..1146: mol_type = genomic DNA
atggctgctagaccacgttcacataaaatctctgtacctaacctttactgcaagctggataaacgcacggggaaaatttactggcaatataagcatcccctttccggacgcttccatagccttggaactgatgaggccgaggcaaagcaagttgccacagaagcaaatatgattattgcggagcagcgcacccgccagattctcagcgtgaatgaccgactggccaggatgaaaggcaagagaaccgatatcacggttacagagtggctggacaaatatatggccattcaagaagaacgactcaaacacaatgaattacgaccaaattctttcaagcaaaaaaataaaccagttcgtctgttccgtgaacattgcggtttgcaacacttgaaggatattaccactctcgatattgccgagatcactgatgcgataaaagcggaagggcataaccgcatggcgcaagtagtgcgtttggtgttgatagacgtctttaaagaagcgcagcacagcggccatgtgccacccggatataaccctgcgcaggcaactaagcaaccgagaaataaagtcaccagacaacgactttccctagatgaatggaagaagatctacaccagtgctgaacaacaagagccttatcttcagtgcgggatgttgctggctttgattacaggccaacgtttgggagatatctgtaacatgcaatttaaagatatttgggatgatatgctgcatgtggaacaggaaaaaacaggctcgaggctggcgatacctttggatttgaaatgtgatgtgttaggcctaactctaagggatgttatttcgaagtgtcgcgacgctgttatcagtaaatatctggtgcatttcaggcatacatctgcccaagcaactagaggagataaggtttctacaagttcactaacaaccacttttagaaaggcgcgagataaaagtggtctcaattgggataaagggactgctcctactttccacgagcaacgttctttatcggaacggttatacagagaacagggtgtagatacgcaaaaactcttggggcataaaacacagaaaatgacggaaagatataatgatgaccgagggaaagactgggtggtagtgagtgcaaaaacagggtcgtaa

SEQ ID NO: 359 - DNA, 1119 bp, Kosakonia cowanii
  source 1..1119: mol_type = genomic DNA
atggctgcaagacctcgtaaaaataatgtaagcgtcccgaatctatatcctctgtatagccggaaggtcaacaaggtttactggcgttataaacaccctattacgggtaaatttcatgcactcggtaccgatgaagccgaggctatagcgatcgctaccgaggcgaatactcgcctcgcagagcagcgctctcgccagatcatggcgataagcgacaaaatcgctaccagtaaaggtaaagctataaccgcaaacacctggcttgaccgttactggaaaatacaaggtgaaaggctggatagtggcgatattaagctgaacacctataagcaaaaggctaagccagtagccttgcttcgtgagcgggttgggatgaagctaatttcggcggtggatgtgcgagatatagctgaaatattggaagcctatatttcagatgggcaaccgagaatggcgcaggtaatacgctcagttttaatcgatgtgtttaaagaagctcaacattatggggaggttccccctgggtacaatcctgctcttgcaacaaagcagccgcgccgacgtataacacggcaacgccttaatctggaagaatggcagaaaatttttgatattgccgacgctaaccacaagtatatgggtaacgctatgctgttagccctcgttaccggtcagcgtttaggcgatatctccaacatgaaattcagcgatatctgggatgaccatttgcatgtcattcaggaaaaaacaggtagtaaaatagccattcctctgtcgcttcgtctgcatgctattaactggagtttacgtgaacttgtagcgcgttgccgggattacgctgtcagtacctatctagtgcatttcttccgggctacttcacaggctgaacgaggagcgcaggtaaaagctaatactttaacgatgaattttagcaaagccagggataaggctaatataggctgggggatggaactccagcaacattccacgagcagagatctttgtctgaacgtctttacaaaatgcaaaaggttgacacccagacattactgggccataaatcgcaacagcaaactgatcgctatgacgatgatcgaggaaaagactggaagaaattga

SEQ ID NO: 360 - DNA, 615 bp, Kosakonia cowanii
  source 1..615: mol_type = genomic DNA
atgccaaaagagatgaacatcaatgcagtacgcggcccgtcggatcattcggttcgcgatcaggttgttgaagctgccaccgagcacttcggccactttggttacgaaaaaaccaccgtttccgacctcgcgaaagcgattggtttttccaaagcctatatctataaatttttcgattccaagcaggcgataggcgaagtgatatgcgctaaccgcctggcgatgatgatggatatcgtcaacgccgctattgcggatgcgccgagcgcgtctgaacaacttcgccggctgttcaacgccgtggtgcaagcaggcagcgatctcttctttcacgatcgcaaactgtatgacattgctgccgttgccgcgcgtgacaaatggccctccgcgcaggcgcacgagcagcgtctgcgccagctcattgagcagatcgtcaaagcgggacgcgaggcgggagagtttgagcgtaaaacgcctcttgatgaagccgcggatgccatctacctggtgatgtgtccctatgtcagccctgttcagttgcagtacaacctggagacggcaccggctgccgctgttttcctctcttcgctgatcctgagaagccttgcgccttga

SEQ ID NO: 361 - DNA, 1110 bp, Kosakonia cowanii
  source 1..1110: mol_type = genomic DNA
atgctcaggcccaatcctgccaccttagctatttgcctcttgccgctggcgattgtcgcctgcggtgacaatggcaacagcgacgatccccgtacccagccgccgctggtgagaactgcccctgtcatgattgcggtcgataacgcccgcgcgtttacgggtaccgtcgtggcgagaattcaaagcgaccttggttttcgtgtgccggggaaagttcttgagcgccttgtcgataccggccagacggtcacgcgcggccagccgttaatgcgcctcgaccccgccgacttaagcctgcaggcggtcagcgctgcccaggcggtaagtgcagctcaggccagggtcagacaggcggcgagtgatgaagcgcgctaccgcagcctggttaccacgggcgcggtgtcggcctctgcctacgatcaggtcaaagcggccgcagagacggcgcgggccgatctgaaagcggcgcaggcgcaggccagcgtggcgcaaaatgcgatgcattatgccgtgctgctggcggatggcgatggggtggtgatggcgacgctggcggagccgggccaggtggtcagcgccgggcaggcggtggtcaggctggcccgttcggggcagcgtgaagcgattgtccagctcccggaaaccctacgcccgtcgctcggcagccgggcgcaggccacgctgtatgggcgtgctggtcaggctctcccggcgacgttgcgactgctgtcggatgcggcggatccgctgacgcgcaccttcgaggcaaggtatgtgctgcagggcgcgctggcaagcgcaccgcttggagccactgtcacgctaaacattaccgaaggtttgtcacccaagccgttactgcaggtgccgctggcggccgtttatgacgcgggaaaagggccgggtgtctgggaagtgtcaggcaaacccgcccgggtgagctggcaaccggtagaggtggtgagtatcaccgatgatgccgcacgggtgatgggaaatttgcaacccggcgagcctgtggtcgcgctgggcgcgcatttactgcatgagggtgaggcggtgcgacaggcgaagcagagcgacagcgaaatcgcagggagtcgcccatga

SEQ ID NO: 362 - DNA, 3087 bp, Kosakonia cowanii
  source 1..3087: mol_type = genomic DNA
atgagcggcggcggttttaacctctccgcgattgccgtgcgcgagcgcgccattacgctgtttttgattatccttattaccgtcgccgggagtgtctccttcttcaaactggggcgggccgaggatccgccgtttaccgtcaagcagatgaccattatctctgcctggcccggtgcgacagcgcaggagatgcaggatcaggtagcggaaccgctggaaaaatggctgcaagagttgcaatggtatgaccggactgagacctatacgcgtcctggtcttgctttcaccatgctctcccttcaggacagtacgccaccttcccaggttcaggaggcgttctaccaggcgcgtaaaaaagtgggcgatgaagctaaaaacctgcctgccggggtaatcggcccgctggtcaatgacgagttctcggatgtcacgtttgcgctgtttgcgctgaaggccaaaggcgagccgcagcgcctgctggtgcgggatgccgagtcgctgcgccagcggttgctccacgttcccggcatcaaaaaggtcaatatcatcggcgagcaggcggaacgcatctttatctccttctctcacgaccggctggcgacgctcggcatctccgcgcaggatattttcgccgcgctcaacgaccagaatgtgctgacgccggctggctccatcgatacccgcgggccgcaggtctttattcgcctcgacggcgcgtttgatacgctggagaaaatccggcaaacgccgatggtggcgcagggacgaacgctgaagcttgccgatgtcgccacggttgaacgcggttatgaggatccggcaacctttctggtgcgcaatcagggggaacctgcgctgctgctgggtgtggtcatgcgcgagggctggaacggcctggcgctgggcgaggcgcttgataaagaagccgccagcattaatgccgggatgccgcttggaatgtcattgaccaaagtcaccgatcagtcagtgaacatcagttccgccgtgaatgagttcatgatcaagttctttgtggcgctgctggtggtgatggtggtctgcttccttagcatgggctggcgcgtgggcgtcgtggtggccgccgcggtgccgctgacgctggccgtcgtctttgtgatcatggaagcgacaggcaagaacttcgatcgcattacgcttggctcgctgattctggccctcggtttgctggtagatgacgccattatcgccatcgagatgatggtggtgaaaatggaggagggctacgaccgcatcaaggcttccgcctatgcctggagccataccgccgcgcccatgctggcgggcacgctggtaacggctatcggctttatgcccaacggttttgcccactccaccgccggggaatacaccagcaatatgttctggatcgtcggcattgcgttgattgcttcgtgggtagtggcggtggtctttacgccctacctgggcgtcaaaatgttgcccgcgataagaccgattgaaggggggcatgcggcgatctacaacacccgtcgctataaccagttccgtgggctgctggcacgtgtgattgctgcgaaatggctggtggcaggctcggtggttgtactgtttaccgttgccattctggggatggggctggtgaagaaacagtttttccccacctccgatcgcccggaagtgctggtggaagtgcagatgccttacgccacttccattgcgcaaaccagcgccacaacggcgaaaatcgaggcgtggctcaggcagcagaaagaggcggagattgtcacttcctatattggccagggctcaccgcgcttttatctggcgatggcgccggagctgcccgatccttcgtttgccaaaattgtggttcgcaccggcagccaacaggcgcgcgaagcgcttaagtttcggcttcgtcacgccgtggcggatggtctggcgccggaggcgcgcgttcgcgtcacccaactggtgtttggaccctattcaccctatccggtggcctttcgcgtgatgggaccggatccccaggtattacgtgacattgccgataaagtgaaaacggtgatgcaggccagcccgatgatgagaacggttaatacggactggggcgcacgggtgccgacgctacacttcacgcttgatcaggatcgcctgcaagcggtggggctgacctccagcgccgcggcccgccagcttcagtttctgcttaccggcgtgccgattacttcggtgcgggagaatatccgtgccgtggaggtcattggccgcgcggccggggatattcggcttgatccgggtaagatcgccggtttcacgctggtcggctcggccggtcagcgcattccgctgtcgcaggtcggcgaggtggaggtgcgcatggaagagccactgctgcgccgccgcgatcgggtgccgaccattaccgtacggggtgatgttgctgaatccctgcagccgccggatgtctccaccgccatgatgcagcaactgcagccagtgattgccgcgctgccggacgggtatcagattgaacaggcgggctcgattgaggagtccggcaaagccaccaaagcgatggcaccgctctttccgattatgatcgccatgacgctgctgatcatcattttgcaggtacgttcactctctgcgatggtgatggtgtttatgaccgcgccgctggggctggtcggcgtggtaccgacgctgctgctcttccatcaaccctttggtatcaatgcgctggtggggctgattgccttgtccgggattttgatgcgtaacacgctgattctgattgggcaaattcactacaacgagcgggaggggctggcaccgttcgacgcggtgattgaagcgacggtacagcgtgcaaggccggtgctgctcacggcgctggcggcgatcctcgcctttatcccgctgacgcattcggtcttctggggaactctggcctacacgctgatcggtggaacactcgggggcaccattatcacgctggtgttcctgccagcgatgtatgccatctggtatcgcattaaccgccccgatccgcatgaagagaagagggcagtgggttaa

SEQ ID NO: 363 - DNA, 360 bp, Kosakonia cowanii
  source 1..360: mol_type = genomic DNA
atgaaacgtatgccggacaaagacgctggtttctgggcaagtcttatcgcctggctatacagccacaaaacagaatggggatatgcaggtgtggcgggcatgttttctctgctgcgaagcgcctatgcacagtcctcatggagtaagcgtgttcttgacgctgtatcgtgcagcgcgctggcattcttcgccgcgccgacgcttcaggtggttggtggcgtccttaactggaacgtgcccgatacagccgctcaggtgtttgcggtgtacatcgggtatgtaggcaatgactacatcagcgagaagctgcgcgggtggatcagccgcagaacgggagataacagtgaaaatcagtcctga

SEQ ID NO: 364 - DNA, 453 bp, Kosakonia cowanii
  source 1..453: mol_type = genomic DNA
atgaacccgatcaatctcataaagaactattcgcacatcatcgttatcggtctgatttgcgtggcgctctggggactgaatgcccgcaacgcccagttaacagccactaatgagcggcttgaaaaactggcgaacagcaaagacgaccagattaacgatctgcgctcgaaaaacgacggcctggccgccagcgtgggcgaactggttaccgccgtcaggcagcagaaccaggtgatgtctcaggtcactgagcagcgcgctgtaaccgcacagcagaaccggaagctacagaatgaaatcaagcaataccttgaagctgataagtgtgcccagtctcgcgtgcctgacaatgctgctgaccggctgcgcgccgcagcaaaagccgctggtggagtaccggacaataagccagccgcaaatcagcctgccggcagagctgacctcccgcattga

SEQ ID NO: 365 - DNA, 777 bp, Kosakonia cowanii
  source 1..777: mol_type = genomic DNA
atgcgaatgaatgccaaagagctgatcgccgacgccagagtgacatcccctactctgccaccagcagcagcaaagttaatgaccgctatggcagaccgtctcgatgttcagttcgtggcgctgtgcgaatcgcggagcgaggcgaagcatctggctggagagaatgctgttatgaagtcggctattaagactcatagcgaatcggtccacttctgcgtgggttgtgggcaagatgatccatgcagcaatgatgatatttgccacgtcctcgaagaaacacccgccaccgatgcattccttgccaaccagtgcgcagaaacggtggattcagcagtaggtttgctacgcattctgtttaaccaccaagcgcctgtattggagaacgtgacaagcgctttacaagcctttgcagctcagctccgctgtaaatcagttgctccatccagattcgaccagcctcctgttcgtccgtcaataactgcgcttacagttgagcgcaatcagtatggctactggactcatccagtttatgaagaattctgtgacggtcgcgagtatatctccaacgaagaattcaacgtctggatgaagggtaacgggctcgaatggaaagttgactatcgggatgaagaagctctcgacccagaagttgatggttatgacctctcgacgtggcagccagaagcgccagcgggtgaaggctggttcgttggttccattcacgatacagacgatggtgcagtttgcatctggttgcgcaataaggcaggcgaataa

SEQ ID NO: 366 - DNA, 409 bp, Kosakonia cowanii
  source 1..409: mol_type = genomic DNA
atgcgaatgaatgccaaagagctgatcgccgaagccagaacgacagcccctactctgccaccagcagcagcaaagttaatgaccgctatggcagaccgtctcgatctacagttcgtggtgctgtgcgaatcgcggaacgaggcaaagcagctggctggagagaatgctgttatgaagtcggctattaagactcatagcgaatcggtccacttctgcgtgggttgtgggcaagatgatccatgcagcaatgatgatatttgccacgtcctcgaagaaacgcccaccaccgatgcattccttgccaaccagtgcgcagaaacggtggattcagcagtaggtttgctacgcattctgtttaaccaccaagcgcctgtattggagaacgtgacaagcgctttacaagcctttg

SEQ ID NO: 367 - DNA, 620 bp, Kosakonia cowanii
  source 1..620: mol_type = genomic DNA
atgatttacacaactggctccatcgcggtcagcggcaacaccctgaccggcaccggcacgaatttcacacaggcaggctctcttatccgttccggctgcacggtgctggcgctgaccagcccggcgcaggccttccagatcacctccatcaacagcgcgaccagcctcacggtgaccccggcggccagcccggcggttaccgccggcacttcgttcgccattctgctgagcgacagcctcagcgttgacggcctggcgcaggatatcgccgagactctcaccatgtaccagcgttatatggggggctttgctgacgtgatgaacggggccggcgatgtgaccatcaccatcaacggtcagcccgttactgtacctggtcagaagtcgctggcaaagaaaggggctaacagcgatatcacctcccttagcgggctcaccactgcgctcagtattgcgcagggcgggacgggcgcaaaggatgctgccggggcgcgtgcagcgtttgatctggacaatctgtatctgcgaggagaccggaacctggcggacgtcaaaagcaaaaagaccgcgcgcgataacctgggcgtcaatgccagcccgaatatgtggtacgtatggca

SEQ ID NO: 368 - DNA, 759 bp, Kosakonia cowanii
  source 1..759: mol_type = genomic DNA
atgaacctcgaatcattaccgaaattttattccccgaaatcaccgaagcttaacgatcagacgccagcgaccggcggtgtcgcgctgactatcaccgatgtaatggcagcacagggcatggtgcagtcgaaagccagtctcggttttaatctcttcctggcgaaaatggggattcaggatccggcacctgctattgatgggctgatgcgatatgcactggcgctgaaaaatccagtgctgggaaagctgagtgagaaggcacgcggtgaagttttgccggtgctggtgcagtttgcctatgcagattattcgcgttcggcagccagcaaatcgacctgcccacattgcgaagggaaaggcgtggtgcgggaaatgcaggacgtggttaagcaccctggcgttaatggtgtagaggcaacggttaagtacgaagccgtagaagtgatgtgtcagcactgcgcggggaaaggagaggttggcacggcctgccgcggctgtaaaggtaagggaaccgtgctggatgagaagagaaccaaactcctcggcgcacctgtcaggaaagtatgcggtcgttgcaacggataccgcttcagccgtttgcctacaacacttgcgcgggcgcgcatagagaagattattcccgatttgaccagctaccagtggtacagcggttatggcgatgtaatcgcgctgctggtgactaaatgctggcaggaagagacttttgctgagtcacaactgcgcagagtcacaagatag

SEQ ID NO: 369 - DNA, 759 bp, Kosakonia cowanii
  source 1..759: mol_type = genomic DNA
atgaacctcgaatcattaccgaaattttattccccgaaatcaccgaagcttaacgatcagacgccagcgaccggcggcgtcgcgctgactatcaccgatgtaatggcagcgcagggcatggtgcaatcgaaagccagtctcggttttaatctcttcctggcgaaaatggggattcaggatccggcgccagctattgatgggctgatgcaatatgcgctggcgctgaaaaatcccgtgctggggaagctgagtgagaaggcacgcggtgaagttctgccggtgcttgtgcagtttgcttacgcagattattcgcgttcggcagccagtaaatcgacctgcacacattgcgaagggaaaggtgtggttcgggaaatgcaggacgtggttaagcaccctggcgttaatggcgtaaaggcaatggttaagcacgaagccgtagaagtgatgtgtcagcactgcgcgggaaaaggagaggtgggcacggcctgccgaggctgtaaaggaaagggaaccgtgctggatgagaagagaaccaaactccatggcgcacctgtcaggaaagtatgcggtcgttgcaacggaaactgcttcagccgtttgcctacaacacttgcgcgggcgcgcatagagaagattatccctgatctgaccagctaccagtggtacagcggttatggcgatgtaatcgcgctattggtgacgaaatgctggcaggaagaggcttttgccgagatgcagctgcgaaaagtcacaagatag

SEQ ID NO: 370 - DNA, 954 bp, Kosakonia cowanii
  source 1..954: mol_type = genomic DNA
atgcagatgtttattgcaggtaccagctttgacgccatcaacgccatggcggccagttatgttctggatgtcatcaccatcaccggtaccgggagtaaaacctactccctgtccggggtggaactgacgtatgccatcgtgaatgactttatgggagggcagttaaccggggcaacctacagcgtcagtgtcagcggattaaccgtgtcgtggaacgttaataatgccgtcaccctgattgtgtacggcagcccggttgcgggcacgcagagtgactattttggctttcagctcttccagtacctgaacgggatgaggacggtcaaactggcgccgaattatgtcccgttgtgcctgcgggaaatcattgatgtgcctgccggcgcgcgtactgtgcagacacaggttccggcgggtaacccggtcatgtgctttcaccggcataccggagcggcaatggatatctgctggtggaagcccgccacggtcagcgggtatcacgcgctgcagtttcccactgatggcagcaaccagaccgggtgccgggtgtatgtgttttcgaatattctcgcgaacactccggattacgggttctatctttaccgcgacgggcagatggtctggcacagcaactgccttccccttcaggttattccgctgacgaacggggatatcaccagcgacacgccgctggcggtgtcgtccagcgtcacggcgcatatctttgtgccgcaggacccggcttacccgacggggtacagcaactttatgtgtgcatctgcgggaaatgacgggacccggtataaggtgcaggtgggaaaagtattccagagcacctttatcagcagtcccgacgagggcaggcgaatgagagggtgggcatgtggcggggtggggtatatcgaaacgcagttctatgaccagtactacagatatgcccttggcctggcctga

SEQ ID NO: 371 - DNA, 507 bp, Kosakonia cowanii
  source 1..507: mol_type = genomic DNA
atgcgaatgacagccaaagagttgatcgccgacgccagagtgacagcccctactctgccaccagcagcagcaaagttaatgaccgcaatggctgaccgcctcgatctacagttcgtggtgctgtgcgaatcgcggaacgaggcaaagcagctggctggagagaatgctctgatgaaatcggctattaaaactcacagcgaatcggtccacttctgcgtgggttgtggaaaagatgatccctgtagcaatgacgatgtttgctatgcactcgaagaaactccagccactgatgcattcctcgcctccctgcgcgcagaaggggtggagatggcatttgaagcagcgaagccggaagtggctaaagagttccagcgcgagacgtttgatcaatgcgtgacagcagcggtgaaataccctcaaagcgatgtggctggcaaggttgaaatggtcgcctggcttgaatggtatgccgcccagctccgcagtaaatcggaggtgcagtcgtga

SEQ ID NO: 372 - DNA, 1416 bp, Kosakonia cowanii
  source 1..1416: mol_type = genomic DNA
atgatttacacaactggctcaattgcggtcagcggcaacacgctgaccggcaccggcactaatttcaccgcagcaggctcactcattcgtaacggctgcacggtgcttgcactgaccagcccggtacaggccttccagatcaccgccatcaacagcgcgaccagcctcacggtgactccggcggccagcccggccgttcctgccggcacaaagttcgccattctgctgagtgacagcctttctgttgatggtctggcacaggatatcgctgaaactttcacgatgtaccagcgttacatgggcggctttgctgacgtgatgaatggtgccagcgacgtgacaataaccatcaacggtcaggcggtcactgtacctggccagatgtcgcttgcgaagaaaggcgccaactccgatatcacctcactcagcggtctgacctcggccctgagcgtggagcagggcggcaccggcgcaaagaataaagctgatgcgcgcctggcattatctgctgcatcctctggtgctaactcagacatcaccagtctgtcaggactgaccacggctctcagtatcgcgcagggcggtacgggcgcaaccagtgtttccggcgcgcgcgctgcccttggtatcggtgcagcagcgtctctcggtgatgcgctggcagcaggcgcggtgctcaagagagaaccgggtaacgtaaacacgacactgaacaacccgacagctatcttcaactggctcaggtctgtcggcttcgggagttatcagttcacggccgctcaggcaggggcaatcatccggtactaccccactttttattttaatgcgggtaacctgcacgctcttctgcagtcgaattactcgacgggtgagctcatctcctggggggctgttgataacggtgggtcatggtcctttgcgcaaaacatcctttatggtacagcaaacaccacaagagcaactgacggaacaattcgggcagcttcgccgattgttcgtattgttaaaagcaaagaatactgtacccgaccagatattgatgagcttgattttaagtggtgcggtgccggcgtggctaacgcagaagccgaaggggtgacagtagaaagaccttctaccggtgtttatctgcttaagggttctgacggtctggccaggtctggctggcaaatgtcaccgccacgtgatccgcaaggttctggcgatatggggatcgttgaagcagagcagggggaggatggctcgttaatcattcgactctataaacgccgttacgtgatgactgacgacggtgatatcgaggtagctaaaggggcccctatcgatgttccgcctaccagttggatcgatatacgtctggatatgccagaaaccagtatctggaatcagcgcaatgcagcttcgcagaagcaataa

SEQ ID NO: 373 - DNA, 339 bp, Kosakonia cowanii
  source 1..339: mol_type = genomic DNA
atggcagttgagacgttctcctggtgcccgaaggtggcggcacaggcagataccagtttccgcatccgcaaggcgcagttcggggataattacgcacaggtggccggggacggcatcaacccggtcacaccgcagtggagcgtgagttttaccggcgatgaagcgtatgtccaggccataaaggcgtttctgaagcggcatgccggctggaagtccttcatctggaagccgcccctggagcccgcggggttatggcggtctgaatccctccagatagccacccacggcaatgacaaatacaccctcagcaccacattcattcaggcataccatccatga

SEQ ID NO: 374 - DNA, 3090 bp, Kosakonia cowanii
  source 1..3090: mol_type = genomic DNA
atgcgcgagtatggctacagctcggaagaagtactcaaaattaccgaagccgtttcaaccgggctcaagctttccggcgccagtacgcaggagtcaagttctgttattacgcagtttagtcaggcacttgctcagggtgtattgcgtggcgaagagtttaatgcggtcaacgaggcgggtgatcgtgtcatccgtgcccttgctacaggcatgggcgttgcgcgcaaagatctcaaaagtatggccgaccagggaaagctgacgatcgataaagtggtgccagcactaatgagccagctcggggcgttacagggtgagtttgcaacgatgccgcaaactgtttcaggctcattgcaaaaggtcactaactcgttcatggggtgggttggtggtgttaacgcagcaacgggtgccacggatgcgctgtccggtggccttgatggcgtagcacagacactggactcctttacttcatccgcggtcagcggtgctctgagtgacgtggctgacaatatgtcaaccatcaccacagtcgcaggcgcgctggtgggggttggtctggctaaatacctcggcggaattgttaccagcgccacaagtgcgacaggtgctttgatctctgctgctaagtccgaagttgccctggctgtagctcaagacaaagcggcccagtcagcagtagcggcttcaagagccgatgtttatcgcgcgcagcaagccttgcagagagccaagggcgctgatgttcaggctgctcagcaggaaaaagtagcggctgcagaggcaagggtaacagcagctcaggccaggctcacgacggctcttgccggaggcacagcaacagagaaagtcagagccagagcagcgcttgagcgtgctcaggcaggtctggcagctgctaagaatgcggatgttcaggcagttgctgaacgacgactggcacaggcagaggccgcgcgtgacaggaacctggctaaccgcgtctcgactcaaagcaatttaaacagtgtcacggcagtcggatcgcggctcatgaatagcgcactgggaattatcggcggctatcccggcctgcttatgttagtggctggtgggtggtatgcggcgtatcaaaatcaggagcaagcccgccgcgcagctgtggagtacggcagaacgatagatgaggtaagcaaaaagaccagggaaatgtctctgcccgaagcttcagataatggagagaaagcaaaaaaatctcttgatgaacagaacaggcttattgatgagcaaaaaagcaaaatcgaaagtctgaaagtacaaattgccggatcgcagtatctgatcaataaccctggtccgacaactaaaggtggtttcatgataaaccaccttacatctatgaagactgtaactgatgaactgtctactgcaactgagcagttgtcagttgaacaggaaaggctttctcagatgcaggagaaagcagcctccattcaacaagcactcgagggatttcagtaccgtcgcgtctcactgattcgagaggaggcggcacaccagaacgcagcttatcagtctctgctgatgatgaacggtcagcatcaacgatttaaccagcttctcgggcttggcaatcagttactgatggcccgtcagggaatgaccctggcaccccttcgtgttcctcaggcagaagccacgcagaaacagacagaagcgctcgaaaaaagccggcgcgagcttgccctttcccgcctgaaaggcgaggcaaaagagcgcgcacgccttggctatgccgctgatgagctcggttttgttactaccgatccgcgctatcaaaccaaccggcttgagttcatcaataacgggcttgaagagtggcgcaataacgaggccaacaaaaagcagcccaaagggccaaagacggacgaagaaaaggccgctgatgcttataaaaggatgatcaagcagcagaaggagcagatcgcccttcagggccagagcaccgaacttgccagggtgaaataccaggtagttgaaggcgaactctccacgctggacaaggcgcagaaggctgaactgatgcgcaacgccgcattaatcgatcaggtcaaacttcgtgagcagctgcgtaattacgaggcgaatctggctgacagcaatgccagcgccagggcggcgaatgatgcgcagctcattggttacggtcagggcacccggttccgtgagcggatgcaggagcagtttaatatccgcaaggagtttgagcagaagaataccgatctgctccggcagcggcaggccggggacattgacgaaaccttctaccagcaggggctggcactcaacaaacgctatctggaagagcgcctgcgcgaccaggaggggtattacaccgcttccgatgcgcagcgcggtgactggttaacaggcatgtcagagggctatgcgaactgggtggacgaggcaacggactacgctggtatggctgccgacgggatgaagcaggcgatggggggggcggtgaccaccattaccgacatgctcaacggcaatctcgacagctggaaggactggggcatgaacgtgctgaaaattatcgagaccgttctcgttaatatgatggtcgccaatgccgcgagttctctcggctcactcttcagctttggtgcctcatccgccgcaacggccagtagcgggacggccattcagagcgctgcctcaaacttcaccttcaatgccgccggcggcgtctacgactcaccgtctctcagcgcctacagcaacggcatttatcagacgccccagctgtttgccttcgcgaaaggggccggggtatttggcgaggcgggtccggaggcgattatgccactcacacgggcacctaatggtgatcttgctgttcgcgcagtagggatgccgcagttttccggcggcggcccgtcagtgtccttcggcgatatcaacattcagggcggtgcgcagtcgacggcagggcagggagcagccgcatctgccggcaggcaactcaaggatgcaatcgtgaccgtaattaatgagcaggccagcatgcccggatcgccattgtggcggcttttgaaaggagcgtaa

SEQ ID NO: 375 - DNA, 177 bp, Kosakonia cowanii
  source 1..177: mol_type = genomic DNA
atgaacaggaaagcgtttataaatgattttatattatggataaataataacattgaatcacatctgaaaattgatgatgtcgccataaagtctggttattcgaaatggcgcttacaaaggctgtttttagcggagaccgggcagactcctggtcagttcatcagagagaaaagttag

SEQ ID NO: 376 - DNA, 348 bp, Kosakonia cowanii
  source 1..348: mol_type = genomic DNA
atgaaccttcctgaatctgtcgggccggtgccggttgtccgcacacctgacggctactggtgccaccccgcactgactgtattttaccgtgaccgggactgcgtcccgcaggctgaatatgaccactggctggtcagcaatggcctggaggataccctggtctgtctggataccgatgatgacacgccggcggcgcaggcatatgcccgcaacgccgatatttcatactggacgccgcccgtacctgcaggtgagggctggtttaccggcgcgatattcgacgacgagggttacggtcccgcctgtatctggctgcgccggcgggaggtgccatgcgacgcaggctga

SEQ ID NO: 377 - DNA, 615 bp, Kosakonia cowanii
  source 1..615: mol_type = genomic DNA
atgactaaacagataaacgatacccccacgcgggggccttccgaccatagtgtccgtgatcaggttgttgacgcagccactgagcatttcggccactacggctacgaaaaaaccacggtctccgatctcgccaaagcgatcggtttttcaaaggcttatatctataagttttttgattctaaacaggcaatcggcgaagttatctgctcaaaccggctggcgatgatcatggaaattgttaatgctgcgattgcggatgcgccgacagctgctgagaaaattcggcgattattcagagcattatcagaatccggcagcgatttgttttttcgtgaccgtaagttgtacgacatcgcggccgttgcggcacgtgataactggccttcagcgcaagcgcatgagcaacgtctgcgtcagcttattgaacagatcattgttgaagggcgtgaggctggtgagtttgaaagaaaaactccccttgacgagactgctgatgcgatttttatggtcatgcgaccttatatcagcccggtgcagctgcaatataatctggaaactgccccggccgcagccgtattactgccctccctgatcctgagaagtttgtccccatga

SEQ ID NO: 378 - DNA, 1110 bp, Kosakonia cowanii
  source 1..1110: mol_type = genomic DNA
atgttcaggctcaaacctgccacttttgctgtttgcctgttgccgtttgcacttgtggcctgcggcgacgcttcagataacagtgatccccgcagcctgccccccctggtcaggtctgccgcagcgatcaacgcaacccattcttcccgcgcttttacaggggtggtggttgcacgtatccagagtgaccttggtttcagggtacaaggcaaaatcctggaacgtctcgttgataccggtcaggccgtgaaacgaggccagccgttaatgcgtctggaccctgtggatctgagcctgcaggctcaggctcagcaccaggctgtcgctgcagcaaaagcacgcgcccgacagacagcagacgacgaatcgcgatatcgcggtctggtcactaccggagctgtatcggcatccgcttacgatcagattaaagccgcggcagatacggccagggctgatctcagcgccgcccaggcgcaggcgaatgtggcgcaaaacgccatgagctacgcagtcctggtggctgatgatgacggggtggtgatggatacgctggccgaacctggtcaggtggtcagtgccggacaaccggtaatcaggcttgccagagccgggcagcgtgaggcggtcgtccagttacctgagacgctacgtccgtccccaggaagcacggcacaggcttctctgtacggcagcgataaacagcctgtttccgcgacactgcggttactctcggatgccgccgatccgttgacgcgcacgttcgaggcacggtatgtgctgaacggcccgttgtctggtgccccactggggtccactgtcaccattcatattgcgcagggcagaacatcgcagccgttgctgcaggtgcctttagccgccgtttttgatgcgggtaaaggcccgggtgtctggagcatttctggaaaccccgccagagtggcatggcgtccagtacaggtcgtcagcctcggggatgatgcggcaagcgtgaccggcagccttaagcctggcgaacaggtcgtggcgctaggggctcatctgctgcatgacggtgagacagtccggctggcgaagcagagcgatgtcagtgtcgccgggagccagccatga

SEQ ID NO: 379 - DNA, 3111 bp, Kosakonia cowanii
  source 1..3111: mol_type = genomic DNA
atgagtagtggacgtttcaatctttccgcgctcgctgtgcgtgagcgttcagttacgctgtttcttatcctgttaatcaccgttgccggcattctctcgttccttggactggggcgcgcagaagacccaccctttacggttaagcagatgaccatcatttccgcctggcccggagccacagctcaggaaatgcaggaccaggtggccgaaccgctggagaagcgtctccaggaactcaagtggtatgaccgcaccgagacctacacgcgccccggcctggcttttaccatgctctcgttgcaggacagtactccaccttcagaggtccaggaagagttctatcaggcacgtaaaaaactcagcgatgaatcaaggaacctcccagccggggtaattggtccgatggtcaacgatgagttctcggatgtcacgtttgcgctctttgcgctgaaagcaaaaggagagccacagcggctactggttcgtgatgccgaatcattacgccagcgcttattgcatgtacccggggtgaaaaaggtcaatattataggcgagcaggccgagcggatttttgtctcattttctcatgaccgtctggcaacactgggtatctcaccgcaggatatctttgcagccctgaacaaccagaacgtgctgacgcctgccggttcaataaacactcgtggtccgcaggtttttatccgtctggatggggcgtttgacaagctggagaaaattcgtgaaacgcctgttgtatcacagggaaggacgctgaagctttctgatgtcgcgacagttgagcgtggctacgaagatccggcgacctttatggtacgtaaccagagtgagcctgcgctgttgctgggtattgtgatgcgtgagggctggaatggtctggatctgggtaaagcgctggataaggaagccgccagcatcaatgcggatatgcctctcggcatgacctttacgaaagtcaccgatcagtccgttaacatcagctccgccgttgatgagttcatgatcaagttttttgtggcgctgctggtcgtgatggtggtctgctttctcagcatgggctggcgcgtgggcgtggttgtcgctgcggctgtgccactgacactggctgtcgtctttgtgatcatggaagcgtcaggtaaaaacttcgaccgtattaccctgggttcgcttatcctcgcgctgggattactggtggatgatgcgatcattgccattgaaatgatggtggtgaagatggaagagggttacgaccgaataaaagcctcggcgtatgcctggagccacaccgccgcgcctatgctggccggtacgctggtcacggccgtcggctttatgcccaacggttttgcacaatccacggcgggtgaatacaccagcaatatgttctggattgtgggaattgccttaatcgcctcctgggttgtggcagtggtctttacgccgtatctcggggtgaaaatgctgccagatatcaaaacggttgaagggggacatgatgctatctacaacacccgacgctacaaccgttttcgtcagttactgacgcgggtgatcgcacgaaaatggctggtcgcgggttcagtcgtcgcggtgttcaccgttgccgttctcggcatggcactggtgaaaaaacagtttttcccgacgtctgatcgaccagaagttcttgtggaagtgcagatgccgtacggcacctctattgaacaaaccagcgccgccgtaacgaaaattgaggactggctcaggcaccagaaagaggcaaaaatcgtgacggcttatatcgggcagggttcaccacgtttctacctcgccatggcgccggaactgcccgatccctcttttgcgaaaattgttgtcctgaccgacagccaggaagcccgtgaggcgctcaagtttcgtcttcgccaggctgcggctgacgggctggcaccggaggcacgtgttcgcgtgacccagctggtatttggcccgtattcaccctatccggttgcctttcgtgtgacagggccggatccgacggttttacgggacattgcagataaggtaaaaacgctgatgcaggccagtccgttgatgagaacggtcaacacggactggggatcacgcgtgccgacacttcatttcaatctgaatcaggatcggctgcaggcggtggggctgacgtcaaacgcggtggcccagcagcttcagttcctgctttcgggcgtaccggtcaccgctgtacgtgaagatatccgttcagtgcaggtcatgggacgtgctgccggcgatatcaggcttgatccagcgaaaatagctgactttaccctggttggttccgcagggcagcgtatccccttatcgcaggctggcgaggtcgaagtgcgcatggaagatcctgttctgcgccgtcgtgatcggatgccaaccattaccgttcggggtgatattgctgaatcccggcagccgccggatgtctccactgcaattatgaagcaactgcagcccatcatcacaacgctgccggatggataccgtattgatgaagctggctcgattgaggagtcagggaaagccaccaaagcgatggtacccttattcccaatcatgatagccatgacactgctgattattatcctccaggtacgctcgatgtcagcgatggtgatggtctttatgactgcgccactgggactggtaggcgtggtgcctaccctgctgctctttaaccagccttttggcatcaatgcgctggttggcctgattgctttgtcaggaatcctaatgcgtaacacgctgatcctgatcggccagattcaccataacgagcaggaaggacttgcgccctttcatgcagtcattgaggcaacggtacaacgttccagacccgtgctgctcacggcgatggcggccattctggcctttatcccgttaacacattcggtgttctggggaacccttgcctacaccctgataggcgggacactgggtgggaccattattactctggtgttcctgccggctatgtatgccatctggttccggatcaagaggccggattcaacctcgtcaacggaaaaacatttcagctcagaaggattaaaaaatgtctga

SEQ ID NO: 380 - DNA, 1467 bp, Kosakonia cowanii
  source 1..1467: mol_type = genomic DNA
atgtttcccctaaacacgcttgcagtggtggtgggtgcctgcatcctgacgggttgtgccgtcggaccggactattatcgtcctgaggtacccattgcgaagcattaccacgctcaacaggctttacagcagcccactacatccgaatccgccaatttttcaatctggtgggaaaactttggcgatccgctgttaagtcggttcgtttcagatgcacttacgcaaaatcttgacctcgcccaggcatccgccaggatgatgcaggcacaagccgggctgggagcggcaacggcggcgctgcttccctcgggaaatatcagcgggcaagctgcacgtacgtatcagtcggttgaaacaccgttgggtcaggtgcttagttcaacgccggattataatcgctacggcaattcgtatgaaatggatctcaatgcaggctgggagatagacctgtttggtggcctgagacgaggtcgtcaggctgccctggccgattatcaggcttctcaggccggtgtagcggcgacacgcctcgctgtcgcagcacagactgcagatatctatatcaccctgcgtggattacagtcccgtctggatattgcgaataaacaggtcattacacaacagcaactgctggaaaaagttcagctgttgtacagcaaagggctggcatcagaatatcaggttcgtcagacagaaggcgcactggcacaggtgaaggcaacggtaccggttctgaacaacggacttgatgccgccatgaatgcgctggacgtcatgctgggcgcgcctccggggacgcatcatgcgcaactggcttcaccgggggctattcctcatacacccgcaatcacctcaatgggcaccccggcggacctgcttcgccgcaggcccgatattattgtggccgagcgtcatctggccgcgtcaagcgcccgtatcggtgtggctgtcagcgagtattatccaaagttttcccttaatgctctgcttggcagcgcaacggcagtatcaggcgataatcttttcactgccggagccagccagtcggcaggtgtgctggggttacgctggcggctttttgactttggccgtattaacgcccagataaagcaggcaaagggccaggaagctgaggctctcgcggcttatcgtctgtcagtcttgcgcgcagcagaagacgtagaaaacgcattctcggcactggtcaatcgccagacgcaggcagccacactgacgagcggcgaaaccgccctggccagcgcccgacagtcttctttcgtggcttttcagcaaggtacagccagtctgattgacgtactgcataacgatgaaacgcttctccaggcctcggatgcaagagcgcaggcgcagacagaagctgcccatgcagccgtggcagcattcagggcgctgggcggtggctggcaatctacattgtctgaagaaatagcaaatacgccgggataa

SEQ ID NO: 381 - DNA, 489 bp, Kosakonia cowanii
  source 1..489: mol_type = genomic DNA
atgacacgaattggcattcttggagtaaatgatctgactgaaaccattctggtcgaattgttccgtcttgatccttgcgctcatgtttttctttcatccggggagcatgagcgcgcaaacctgctggcaaggaagtttccgtgctggattcaggatgacgttcaggcggtaattaacgaagcagatatcattatcattacgacaggaacatattcctctgaaaacccgccggaaaaaatcgagtatcgaaaatcacaattaatcttttttttggaagcatggccatcaataaacagtcaggtgttttcaccctatacggataaaaaaataaattttacaaccagacatgtagcactggctaatatttcgccatttattcatctaacagaaatacagattgatgactatctttttattcttaaagtcctgttggttgcaatgaaacccgtgcatacacttgatgtcaatttcagatcgtcatctgaataa

SEQ ID NO: 382 - DNA, 618 bp, Kosakonia cowanii
  source 1..618: mol_type = genomic DNA
atgcgaatgaatgccaaagagctgatcgccgaagccagagtgacagcccctactctgccaccagcagcagcaaagttaatgaccgctatggcagaccgtctcgatctacagttcgtggtgctgtgcgaatcgcggaacgaggcaaagcagctggctgcggaaaatgctgcgctgaagtctggagcttcatatttctcatacgggtctgagcattatttcgaatatcacaaaacggctgaggaagctgtagaggcagctgaagctgcaatcgacgactatcgcggcgacgcttgcgatggatggagtgaagaagtcgacagcatctgctggggcgtgattatgcagtcttccacgaaggttggtgaacgcccacgcaacgaagatgaccgttgtgacccggcgatcgatacggtttgcgattatgcgctgctgcctaatatcgaaactcccgccaccgacgcatacgcagcctccctgcgcgcagaaggggtggagatgctgcggcaacatccggcgatccaactttgcagcctgacccatgtttgcgatgaagtggtcgcccagctccgcagcaaatcgaacgaggcggtaaaatccatcgcaggggaaagccaatga

SEQ ID NO: 383 - DNA, 1464 bp, Kosakonia cowanii
  source 1..1464: mol_type = genomic DNA
atgatttatacaaccggttcaatcgtagtcagcggtaacacgctgaccggtacaggcacaaacttcactgccgcaggctctctcattcgtaacggctgcacggtgctggcgctgaccagcccggcgcaggctttccagatcacctcagtcgacagcgcgaccggtctcacagtgaccccggcggccagccctgcggttcccgccggcacgaagttcgccatcctgctgagcgacagcctgagcgtggatggcctggcacaggatatcgctgaaacgttcagtatgtaccagcggtacatgggcggctttgctgacgtgatgagcagcaacggagatgtgaccatcaccatcaatggtcagcccgttaccgtgcctggtcagcaatcgctggcgaagaagggggctaactcagacataaccagcctgaacggaatgaccaccgcactcagtatccagcagggtggtacgggaggaaaaactgcagcagaagcccggaataaaattggcgccgcgagctccggaaataacagcgatatcaccagtattacggggctgaccaccgcacttggcatccagcagggtggtacaggaggaaaaactgcagcagaagcgcggactaaccttgggttgagtgatgtcgcgacgaaaaccgccggtacagccgaaggttcagtcatgctggtgggtgccatgggaacgccgacaggcgggtataaattttacaaaaccgaaggtgccattgctccgacgctcaactggaacgacatcacactgcccgggctttttccaaaccttatcgatgcatcgaactcagcaaactcgccgacggcaagcggttactactacgcgcaggtacttgtgcggggtgattccggggcagttcagcaaattgcactgccttacgccacatctgcgtcaaacccggggcgcattctgtatcgcggcaaaaacggaaacacctggtcctcctgggctgaattttacaccacagcaaacaccaccaaagccagcgacggaacagtcaaggcggcttcgcccattgcacgtatcgcagcggacagaaaaacctgtctccggactgatatctctgatgatgggttcgcgtggtgcggttgcggtacagcaaatggtgaggctgaaggcatcactatttcgcggctcgatactggtgtttatgttatcgccggttctgctgggctggcatcctctggctggcaacttttaccaccccgagatccccagggttcaggtgatctgggtattgttgaggctgaagagactgaaagcggggggctgactatccggctgtataaacgccgttacgttctttcagaagacggagacattgaattacagaagggggcagcgattgatgtaccgccgacaagctggatcgatgtccgtcttgaaatgccagaaacaagtctctggaatcagcgcgctgctggcactcaggagcaataa

SEQ ID NO: 384 - DNA, 711 bp, Kosakonia cowanii
  source 1..711: mol_type = genomic DNA
atgcgggacaagacaatcagcgcgattctggcgcatgcggcgcaggcgttcccggctgaatgctgcggtgtggtgatccagaagggacgggttgagaagtatgtcgcctgccggaatctggccgcctccccggaggagcagtttgaactgtcgccggaggattatgcggcagccgaagagcagggcacggtggttgccgtggtgcactgccaccccggcgacggtgccacaacgcagccaagtgaactcgacatgctgatgtgcgacgcgaccgaagtgccgtgggtgatcgcttcatggcctgaaggcgatatccgcaccatcatgccgcgcggcgatcgcccgctgaccgggcgtcagtttgttctcgggcatgctgactgctggtcccttatccgggattacttccgcactgaacacggtatcgcgctgcccgactacagcgtcgatcgccactggtgggaggagggcgaaaacctctatatggataactggtacgcatgcggtttcagggaattcgacggtccatcccggcctggcgatatggtcattatgcaggtgcaggccagcgtgccaaatcatgccggcgtcctgctggagggcaacatgctgctgcaccacctgtacgggcagctcagccagcgcattccgtatggcggctattaccgtgatcggaccattaaagttttacggtacaaggacctgatgtga

SEQ ID NO: 385 - DNA, 339 bp, Kosakonia cowanii
  source 1..339: mol_type = genomic DNA
atggcagttgagaccttctcctggtgcccgaaggtggcggcgcaggcagataccagtttccgcatccgcaaggcgcagttcggggataattacgcccaggtggccggggacggcatcaacccggtcacaccgcagtggagcgtgagttttaccggcgatgaagcgtatgtccaggccataaaggcgtttctgaagcggcatgccggctggaagtccttcatctggaagccgcctctggagcctgcggggctttggcggtctgaatcccttcagatagccactcacggcgcagatctttacaccctcagcaccacattcattcaggcataccatccatga

SEQ ID NO: 386 - DNA, 3492 bp, Kosakonia cowanii
  source 1..3492: mol_type = genomic DNA
atggcaacgcttcgcgaacttattataaaaatttctgctgactccagctcattccagagtgagatcacccgcgcctctcgcatgggctccgactattacagaacaatgcaggcgggaggccgccaggcggcggcggctgctaaagaaagtgaaagggcgttatctgatctcactaatggttttgcctcagcaggtaaagccgcagctgcggcaactgcggcttttgctacagggaagctggtgcagattgcagacgaatggaactcagtgaatgctcgtcttcaacaggcttctgcttcggctgatgattttgcgacttcacaacgtcagcttatggaaatcagtcagcgcacgggtacagcgttctctgataatgccaacctctttgcccgcgcagctgcatcgatgcgcgaatacggctatagctcggaagaagtgctcaaaatcaccgaagccgtttcaactggccttaaactttcgggtgccagtacagctgaggcaggttcggttatcaatcagttcagtcaggcactcgcccagggcgtgctacgtggtgaggaattcaatactgtcaacgaaagcggcgaccgcgttatcagggcgctggcagctggcatgggcgttgcgcgcaaagatctcaagagtatggccgaccagggcaagctcactatcgataaagttgtgccagcgctaatgagccagcttgggacattacagggtgagtttgcaacgatgccgcagaccgtttctggctcattgcaaaaggtcacaaactcgttcatggggtgggttggaggtgttaacgcggcaacaggtgccacggatgcgctgtccggtgggcttgatggtgtagcccagacactggactcctttacttcatccgcggtgagcggtgccctgagtgatgtggccgacaatatgtcggttatcacaaccgtagcaggcgcgctggtgggcgttggcctggctaagtatctcagcggaattgttaccagcgccacgagtgcgacaggtgctttgatctctgccgcgaaatcagaagttgccctcgctgtagcgcaagacagggcagctcagtcagctgtggcggcttccagagctgacgtctatcgtgcacagcaagctttgcagagagcaaagggcgctgatgttcaggctgctcagcaggaaaaaatagcagccgcagaggcaaaggtaacagcagcacagtccaggctcacgacggctcttgccggaggtacagcaacagagaaagtcagggcaagagcagggcttgagcgtgctcaggcaggtcttacagcagctaaaaatgcggacgtacaggcagttgctgaacgacgactggcacaggcagaggccgcgcgtgacaggaacctggccaaccgtgtctccacccaaagtaatctaaacagtgtcaccgctgtcggatcgcggctcatgagtagtgctctgggagttatcggtggtattccaggtctggtgatgcttggcgcaggagcatggtatgcggcgtatcagaatcaggaacaggctcgccgttctgctcaggaatacggcagaacgatagatgagataagcaaaaagaccagggcgatgtctttgccggaagcttccgacaacagtgaaaaagccaaaaaagctcttgatgaacagaacagacttatcgatgagcaaaaaagcaaaattgaaagtctgaaagagcagattgccggatcgcagtatctaatcaacaaccccggcccgactacgaaaggtggtttcatgatcaaccaccttacctctctgaagactgtaactgatgacctgtcgactgcaactgagcagttgtcggttgaacaggaaagactttctcagatgcaggagaaagcagcctccatccaacaaactctcgaggggctccagtaccgtcgggtctcgctgattagagaggaagcggctaatcagaattctgcctaccagtctctgctgatgatgaacggccagcatcaaacatttaaccatcttctcgggcttggcaatcagttactgatggcccgtcagggaatgacactggcacccctgcgtgttcctcaggctgaagcctcgcagaaacagaccgatgcgctcgaaaaaagccggcgcgaactggccctgtcccgcctgaaaggcgaggcaaaagagcgcgcccgccttggctatgctgctgatgagctcggtctgacggctgatccgcaattccagaccaaccggcttgagtacatcaataacgggcttgaagagtggcgcaataacgaggccaacaaaaagcagcccaaagggccaaagacggacgaagaaaaggccgctgatgcttataaaaggatgatcaagcagcagaaggagcagattgcccttcagggccagagcaccgaactagccagggtgaaataccaggtggttgaaggtgaattgtccaccctggacaaggcgcagaaggctgaactgatgcgcaacgctgcgttaatcgatcaggtcaaacttcgcgagcagttgcgtaattacgaggcgaatctggctgacagcaacgccagcgccagggcggccaatgatgcgcagcttattggttacggtcagggcacccggttccgtgagcggatgcaggagcagttcaatatccgcaaggagtttgagcagaagaataccgatctgctccggcagcggcaggccggggatattgacgaaaccttctaccagcaggggctggcactcaacaaacgctatctggaagagcgactgcgcgaccaggaggggtattacaccgcttccgatgcgcagcgcggtgactggttaacgggcatgtctgagggctatgcgaactgggtggacgaggcgaccgactattccgcgatggctgcggacgggatgaagcaggccatgggcggggcggtgaccaccattactgacatgctcaacggcaatctcgacagctggaaagactggggcatgaacgtcctgaaaattatcgagaccgttctcgttaatatgatggtggcgaatgccgcgagttccctcggctcgttcttcagctttggtgcctcatccgctgcaacggcaagcagcgggacggccattcagagcgcagcctcaaactttaccttcaacgccaaaggtaatgtctacgactcaccctctctgagtgcatacagcggtggtgtctaccagaccccgcagctgtttgcttttgcgaaaggagccggggtttttggtgaggccggtccggaggcgattatgccgctcacgcgcgcagcggatggttcgctcggcgttcgcgcagttggcgcgccgcagttttccggcggcggcccgtccgtgtcgttcggcgatatcaacatcaatggcggtgggcagtccacggcaggacagggggccgccgcaactgccggcaggcaactcaaggatgcaatcgtgaccgtaattaatgagcaggccagcatgcccggatcgccattgtggcggcttttgaaaggagcgtaa

SEQ ID NO: 387 - DNA, 3804 bp, Kosakonia cowanii
  source 1..3804: mol_type = genomic DNA
atgacgaacacagtgattaaagggcgtaagggtggtggcaccaagacccgcaccccggttgaagccccggacagtattcagtccatagccagagccaaaattcttgtcgcgctcggcgaaggggagttcgctggcggccttgacgggcgcagcatttatctcggcgacgcgtcatcgtataccccgctgcagaatgccgacggcagttttaactttaacaacgtcaaatatgaattccgttccggcacccaggatcagacctacattcagggctttccgggcgttgagaatgagttgcaggtcgcctacgagcttaagcaggctgtgccgtatgtccgctctgtctccaatacccagctttcagcactgcgcatccgcctcggctggccctcgctgctgaaccagaaagacaacggcgataaggtgggtacccgtgttgagtatgcgatcgacctgtctgccgacggcggcacatatgtgacggtggtcaacggcgctgtcgatgacaagaccaccaccctctatgagcgcagtcatcgtatcgacctgccgaaagccaccaccgactggcagctgcgcgtgcgccggataacgccggattcgacgacggtgaatgttgtggacagtatgcgcgttgaggcggtcaccgagatcatcgatgcgaagctgcgttaccccaacactgcgctgctctacgtagaatttgacgcgaagcagttcccgaacggcatcccgcaggtggtgtgcaatccaaaaggtcgcattatccgcgtgcctgatacctacgatccggaaacgcgcagttattccggcacctgggaaggcgggtttaaatgggcatggaccgataacccggcgtggatttattacgacatcgtgctgaatgagcgcttcggcctcggtcagaggattgatgcgacccagattgataaatgggagctgtaccgtatcgcgcagtactgcgatcagctggtgccggatggcaaaggtggcagcggtatggagccgcgctttcgctgcaacgtctacattcaggagcgcaatgacgcctggacggtgctgcgcgacctggccggcatattccgtggcatgacctactggggcgacaacaagctgtatgtgctggccgatatgccccgcgatctctggcacatctataaccatgccagtgtggtcgacggtaaatttaccttcgccgatccgagcgaaaccacacgcaacactgccgcgctggtgaactggtctgatccggcgaatcactacaaagacacgcccgaagtcgtttatgacaacgatctggcgatgcgcttcgattacagccagctcgaaatgactgccattggctgcacccggcagtcagaggctaaccggcgcgggcgctgggcgctgctcacgaacggcatcggtgaggtggtgaccttcagcacgggtatggatgttccccctgtcggtgaggtgatcggcgtggccgcgaacgagctggctggcagggtgattggcggcagggtaagcgcggtcagcggtcgtaatatcacgctcgatcgggccgcggatgtcaaagcaggcaaccggctctttctcaacctgccgtcaggtgtggctcaggcacggaccgtgcaggcggttaacggcaacactgtcacggtcaccaccacctacagtgaaacgcctgaggcggagtgctgctggggtgtggatgctgacgatctgtttatcgcgctctttcgtgttacgggcacccgtgacaacgatgacggcactttcgaggtgaccggcgcgacgtacagcccggatatttacgctgcggttgatactggcgcccggctcgatgaaaggccggtcagcgtcattccgcccggcgtgcaggcaccgccggaaaacatcgtcatcgacagctattcgacggtcagccagaacatagcgatcaccaccatgcgtgcggcatggaaacccgtcaaaggggcgattgcctatgaggctgaatggcgccgtgacagcggtaactgggtgagtgtaccccgcacctcctctcagggattcgaggtgccgggtatctacgccgggcgctatctggtgcgggtgcgcgcggtgaacgccagtgatgtctcgtccatatgggcgacatcagctgaggtcacgctcaccgggaaagtgggtaatcccccgaagccggtgggcttcacggccactgaaaccgtcgtgtttggtattgagctgaactggggcttcccggcgaacacggacgacacgctgaaaacggagatccagtatagcctgaccggtagtgctgatgatgccatgctgctggccgacgtgccttatccgctgcgcagatatcagcagatgggacttaaggccgggcagattttctggtaccgcgcgcagctggtggaccggaccggtaacgaatccgggtataccgactgggttcgcggtcagtccagcactgatgtgaccgacattacagaggcggtgctcgcgcagatcaaggataccgaactcttcaaagacctcatcgagaacgccgttgagagcagcaaggcggtcgcggatctggctgaggcagtgaagcagaacgccgacggcctggctgcggctgcaggcgcaaaccgccagacagcagaagcgattatcggtaatgccctggcgatcgcggatgtcgttgtccggcagtctgcccagcagggcgctaactccgcgaaatttgagcagctgcgcgaagttatcgccaccgaaacagaggcgcgcgttacggatgtgatccgcctggaggcaaagacggatcagaacgccgccggcatcaccgaagtgcgccaggcgctggcaaacgaaaccgaggcacgggcgacagctgtcgatcagcttactgcgcagacggaagagaataaggccagtgtcacagcgctgacgcagaccgtgacggatctggactcgtctaccgcctcgcgctttgaggagatttcggcagagatcgcgggcatagacggcagtgacatcagagggggaatacagagcaactccatcgcgctgatcaccaccacgctggcgcaggttaacgatcgtacccggttcagcgtgcagtacggcgacaacaaggccgggattgaacgtgttgataacgtgatggccgatgccagccaggctgtcgcggagtcgctcaggacgctggatgccagttccggcgtcggcacggcaaacaccaccgactttgcgaaaaccatggctgacttctcgcaggtttcggcgacaaaaatcaactccctgtcagtgacggtaaacggtcagcaggcggccatcgtccagaatgctcaggtttctgccgatatcaacaataacctgaatgcgatgtacagcatcaaggtgggtgttgatgccgctggccgccagtacgctgcaggcatggggatcggtgtgcagaataccccgtcgggcatgcagtcgcaggtcatttttctggccgaccgtttcgctgtgatgtcgcaggcaggcggaacggtgagcctgccgttcgttatccagaacgggcagacattcatcagcgatgccttcttcagggatgccagcattcagttcggtaagataaccgactccctgaagtcagataactacgccgcaggatctgcaggctggaatctgccgaaaagtggcaacgcggagtttaatcaggtgacggtgcgcggcgcgatttatgccacaaacggtaatttcaacctcaccgggccgggcaatacgaccgtgattaatgggctgggtgtcacggttaaccttgcaaacggcggtcttataagactggggagctggtaa

SEQ ID NO: 388 - DNA, 759 bp, Kosakonia cowanii
  source 1..759: mol_type = genomic DNA
atgaacatttcatctgatgtccagaaactggagccgggcagccgcgtccgccttgtcgaagtcgacggcgaggcattcggcgccggcattctgcggtttcataatgaaaccatccctcacacagaggccgagatcattgctgcgggcggcgatgcgtcaaagcttccgccgaagtctgtctggtggcaggggctggagtacggtgcgtggccctttgaactgaccggcctgtccgtcagcagcgacgggcagagcgcccgaccaacactgaccgtggcaaatatcagcggcacgattggcgcgctctgtcgccgctttcaggggatggctaaggcgaaagtgattatccacgagaccttcgctcattaccttgatgcccgcaacttctccggcggcaatcctgccgctaacccgaatgaggagcgcaaacaggtctattacatcgatcgtaaatccagttcggatgatgaaaccgtggagttcgagttgtccagcccggcagatctgcggggacagctcatccccacgaggcagatccagcctatgtgtacctggtgcatgcgcggctggtacaaaaccgggaatggctgcacctacgccggacagaatggcttcttcgacaaggacggtaacccggtcgacgatccgtcacaggacgtgtgctccggtctgctttccaccgggtgtaaaccgcggttcggcgctgacaacgaacttgactacggcggctttccgggcgcgtcacttctgagagggtaa

SEQ ID NO: 389 - DNA, 600 bp, Kosakonia cowanii
  source 1..600: mol_type = genomic DNA
atggaaaaacggactgttatcaaactgagcggatcgatggcgcagcgcttcgggcgcatgcactgccgggtactgtcctctgccagcgaggttttcagggcgctgtccagcacggtagacggatttgaagattatctccgcgaggcgcgcgccagggggctcgatttcgtcatcttccgtgatcgccgcaacatcagccaggaagagttttcgcttctcggccccggcgatgagctgcgcattatcccgctgatacgcggcagtaagcgtgccggcatcttccaggcggtgctcggggttgccctgattgccgggggtatcgccctaggccctgccggggccgggcttattggtaaaggggtcgcgctgaatgttgcgctggttggtgcatcgatggcgctggggggcgtagttcagttgctgtcgccgcaggtggcagggatgaggatgcgtcaggatccggataacaagccttcctatgcattcggcggcccggtcaacaccaccgccagcggcaaccccgtatccctgctctatggccagcgtgagatcgggggcgctatcatttcagccggcatttatgcggaagatcagcagtaa

SEQ ID NO: 390 - DNA, 759 bp, Kosakonia cowanii
  source 1..759: mol_type = genomic DNA
atgaacctcgaatcattaccgaaattttattccccgaaatcaccgaagcttaacgatcagacgccagcgactggcggtgtcgcgctgactatcaccgatgtaatggcagcccagggcatggtgcagtcgaaagccagtctcggttttaatctcttcctggcgaaaatggggattcatgatccggcacctgctattgatgggctgatgcaatatgcgctggcgctgaaaaatccggtgctggggaagctgagcgagaaggcacgcggtgaagttctgccggtgctggtgcagtttgcttacgcagattattcgcgttcggcggccagtaaatcgacctgcccacattgcgaagggaaaggcgtggttcgggaaatgcaggacgtggttaagcaccctggcgttaatggcgtagaggcaacggttaagcacgaagccgtagaagtgatgtgccagcactgcgcgggaaaaggagaggtgggcacggcctgccgcggctgtaaaggtaagggaacagtgctggatgagaagagaaccaaactccacgtcgcaccagtaaggaaagtttgcggtcgttgcaacggaaaccgcttcagccgtttgcctacaacagttgcgcgggcgcgcatagagaagattatccctgatctgaccagctaccagtggtacagcggttatggcgatgtaatagcgctactggtgacaaaatgctggcaggaagaggctttcgccgaggcgcaactgcgaaaagtaacaagatag

SEQ ID NO: 391 - DNA, 465 bp, Kosakonia cowanii
  source 1..465: mol_type = genomic DNA
atggcacttaccgacaaacaagaaatgttctgtcgcgagtacctcatcgatttaaatgccacgcaagcggctattcgggcggggtacagcgtaaagatcgcccgcgcatcaggttgcgagaacctaacgaaacctgacatccaaaacagaatcgccgaattgaaagttgagcgcaacgagcaggttaatgttaatgcctcttatgtgctgaagcgcctgattgaaatcgaccagattgagttgctcggcctcaacccatggttacgcatcaccaatgagacaatcaccagtgcctgtggtagcgagttcctttttaaagagttgcattttgatccgctcggtatcaagtcaacagaaggcttggacatctgctgggttggagaggcgcagtctgtgtctactgactcgcgggacattttgattcccaccttccgtaaggtgggcggaaatcttgatgtcatttaa

SEQ ID NO: 392 - DNA, 834 bp, Kosakonia cowanii
  source 1..834: mol_type = genomic DNA
atgcgcctgaatgccaaagagttgatcgccgaagccagagcgacaacccctactctgccaccagcagcagcaaagttaatgaccgctatggcagaccgtctcgatctacagttcgtggtgctgtgcgaatcgcggaacgaggcaaaccagctggctggagagaatgctctgatgaagtcggctattaaaactcacagcgaatcagtccacttctgcgtgggttgtggcaaagatgatccatgcagcaatgacgatgtttgctatgcactcgaagaaactccagccactgatgcattcctcgcttccctgcgcgcagaaggggtggatggtgcaattgaaaggattatggttcatacgaaccatcaacacgcaggggttgctcaggccttgcacatactccgcatgtacgccgcccagctccgcagcaaatcagtttctccagccggagtcgaccagcctcccgcctccccagcaatcacaccacttccagttgagcgcaatcagtatggctactggactcatccggtgtatgaagaattctgtgacggtcgcgagtatatctccaacgaagatttcaacgtctggatgaaggataacgggctcgaatggaaagttgactatcgggatgaagaagctctcgacccggaagttggtggttatgacctctcgacgtggcagccagaagcgccagcgggtgaaggctggttcgttggttccattcacgatacagacgatggtgcagtttgcatctggcttcgcaataaaaccgaaccatccccggagaccgtaattatcgcgcgccagtttgaacagttgaaggaggctgaaaagtga

SEQ ID NO: 393 - DNA, 1446 bp, Kosakonia cowanii
  source 1..1446: mol_type = genomic DNA
atgatttacacaactggctctatcgcagtcagcggcaacacgctgaccggcaccggcacgaatttcaccgcagcaggttcgctcattcgtaacggctgcacggtgctggcactgaccagcccggcgcaggttttccagatcacctcagtcgacagcgcgaccggcctgaccgtgtcgcctgcggcatcgccggcggtccctgcggggacaaaatttgccattctgttgagtgacagcctgagcgtggatggcctggcacaggatattgccgagacgttcagtatgtaccagcggtacatgggcggttttgcggatgtgatgaacggcagcggagatgtgaccatcaccattaacggtcagcctgtcaccgttcccggccagaagtcgctggcgaagaagggcgctaactccgacatcaccagcctgggcgcactgacaaccgcactcagtatccagcagggtggtacaggaggtaaaactgcagcagaagcccgaaataaaattggcgcggcgagctccgggaataacagtgatattaccagtattaccggactgacgacggctctgagtattcagcagggcggaaccggggctaaggatgcatcacagggatggctgaatctgctgaacggcagaacacccgcgaccgcgcgaggcgatttacaactgggaaccgcagctgtccgtgatgcctacagcacaaccggcgccattctttccgtcggcgattttggtatcggtggaacgtctggcggcgctatcgtaacaaacgccaacctcattaatgcaaacggcatctggggcgccggcggcggcagtggtgtgaactattttgataactattccccgattctgatgatgttccggaccccaaccacaagcggacaactgcaggcgactatcgacggcaaactcgcggtccggggatataacggcagcacgatgagcgcatggaatcagtgctacacaacggggaataccacgcgcgctgcagacggcacaatcaaggctgcatcgcccatcgtgcgcattgtaaaaagcaaagaagactgtacgcgcccagatattgacgaggcagacttcgagtggtgcggagcaggcgtggcgaatggggaggctgagggcgttactctgacccgtgaagcgacgggtgtatatcttctcaagggctctgctggcctggctaagtccgggtggcaaatgtcgcctccgcgcgacccgcaaggttctggcgatatgggcatcgtggaagcagagcaggcggaggatggctcgctcatcattcgtctctataagcgccgttatgtcctttccgaggacggtgacatcgaactgcaaaaaggcgtggccatcgacgtaccgccgacgagctggatcgatgtccgcctggatatgccggaaaacagcatctggaatcagcatgctgagagcgcacaggaagaataa

SEQ ID NO: 394 - DNA, 711 bp, Kosakonia cowanii
  source 1..711: mol_type = genomic DNA
atgcgggacaagacaatcagcgcgattctggcgcatgcggcgcaggcgttcccggctgaatgctgcggtgtggtgatccagaagggacgggttgagaagtatgtcgcctgccggaatcttgccgcctccccggaggagcagtttgaactgtcgccggaggattacgcggcagccgaagagcagggcacggtggttgctgtggtgcacagccaccccggcgacggcgccacgacgcagccgagtgaactagacatgctgatgtgcgacgcgaccgaagtgccgtgggtgatcgcttcatggcctgaaggcgatatccgcaccatcatgccgcgcggcgatcgcccgctgaccgggcgtcagtttgtgctcgggcatgctgactgctggtcccttatccgggattactttcgcactaaacacgatatcgaactgcccgactacagcgttgatcgccactggtgggaggagggcgaaaacctctatatggataactggtacgcatgcggattcagggaattcgacggtccccagcagcccggcgatatggtcatcatgcaggtgcaggccagcgtgccgaatcatgccggcatcctgctggaaggtaacatgctgctgcaccacctgtacgggcagctcagccagcgcattccgtatggcggctattaccgtgaccggacaattaaagttttacggtacaaggacctgatgtaa

SEQ ID NO: 395 - DNA, 339 bp, Kosakonia cowanii
  source 1..339: mol_type = genomic DNA
atggcagttgagaccttctcctggtgcccgaaggtggcggcgcaggctgataccagtttccgcacccgtaaagcgcagttcggggataattatgcacaggtggccggggacggcatcaacccggtcacatcgcaatggagcgtgagttttaccggcgatgaagcttatgtcctggccataaaggcttttctgaagcggcatgccggctggaagtccttcatctggaagccgcccctggagcccgcagggttatggcggtctgaatctgttcagatagccacacacggcgcagatctttacaccctcagcaccacattcattcaggcataccatccatga

SEQ ID NO: 396 - DNA, 2028 bp, Kosakonia cowanii
  source 1..2028: mol_type = genomic DNA
atggggcgcgcgcttggcctgataggtggtgttccggggctcgttatgctcggtgcgggagcctggtatgcaatgtatcagtctcaggagcaggcccggcagtcggcacaggaatatgccagaactattgatcaggtgagccaaaaaacgcggtcaatgagcctccctgaagcagatgataaccgacgtaagactgtagaagctctggttgagcaaaaccgccttatagacgagcagggaaaagctgtttcggcagtaaaaagacagattgatgaacttaataaagcacgcggccagccagggataaccaaagacaacgatctgaatatcgtaaaatctttaagcattctcactgatcagctaactgtagaagagaacaagctctatttgatgcgcgagaagtcggccagcatccaacaggtgcttgagggaattgagcgccgccgtaatgactggatccgtgaacaggcctggcgtcagaatgcggcctatcagtccctgctgatgatgaacgggcagcatgaaaaatttaaccagttgctcgggctcggcaatcagttacttatggcccgtcagggaatgacactggcgccgatgcgtgtacctcaggctgaggcctcgcagaaacagactgaagcgctcgaaaaaagccgccgcgagctggccctgtcccgcctgaaaggcgaggcaaaagagcgcgcacggcttggctatgctgctgatgaactcggtctgacggctgatccgcaattccagaccaaccggcttgagtacatcaataacggacttgaagagtggcgcaataacgaggccaacaaaaagcagcccaaagggccaaagacggacgaagaaaaggccgctgatgcttataaaaggatgatcaagcagcagaaggagcagatcgccctgcagggccagagtaccgaacttgccagggttaaataccaggtggttgaaggtgaattgtccaccctggaaaaggcgcagaaggctgaactgatgcgcaacgctgcgttaatcgatcaggtcaaacttcgtgagcagctgcgtaattacgaggcgaatctggctgacagcaacgccagcgcccgggcggcgaatgatgcgcagctcattggttacggtcagggcacccggttccgtgagcggatgcaggagcagtttaatatccgtaaggagtttgagcagaagaataccgatctgctccggcagcggcaggccggggacattgacgaaaccttctaccagcagggactggcactcaacaaacgctatctggaagagcggctgcgcgaccaggaggggtattacactgcttccgatgcgcagcgcggtgactggttgacaggcatgtctgagggctatgcgaactgggtggacgaggcaacggactattccgcgatggctgctgacgggatgaagcaggccatgggcggcgcggtgaccaccattaccgacatgctcaacggcaatcttgacagctggaaggactggggcatgaacgtgctgaaaattatcgagaccgttctcgttaatatgatggtcgcgaatgcagcaagttctctcggttcgcttttcagctttggtgcctcctcagcggcaacggccagcagcgggacggcaattcagagcgctgcctcaaacttcaccttcaacgccaaaggtggcgtctacgactcaccctccctcagcgcctacagcggtggtgtctaccagaccccgcagctgtttgcttttgcgaaaggagccggggtgtttggtgaggccggtccggaggcgattatgccgctcacgcgcgcggcggatggttcgctcggcgttcgcgcagtcggcgcaccacagttttccggcggtggcccgtcggtgtcgtttggcgatatcaacatcaacggcggtgcgcaatccacggcagggcagggagcagccgcaactgccggcaggcaactcaaggatgcaatcgtgacggtgattaatgagcaggccagcatgccgggatcgcctttgtggcggcttttgaaaggagcgtaa

SEQ ID NO: 397 - DNA, 3804 bp, Kosakonia cowanii
  source 1..3804: mol_type = genomic DNA
atgacgaacacagcgattaaagggcggaagggcggtagcaccaagacccgcaccccggttgaagccccggacagtattcagtccatagccagagccaaaatccttgtcgcgctcggcgaaggtgaatttgccggcggcctggacgggcgcagcatttatctcggcgacgcgtcatcgtataccccgctgcagaatgcagacggcagttacaacttcaacaacgttaaatacgagtttcgttccggcacccaggatcagacctacattcagggctttcccggcgttgagaatgagctgcaggtcgcctacgagcttaaagctgccgtgccgtatgtccgctctgtctccaatacccagctttcagcactgcgcatccgcctcggctggcccacactgttaaaccagaaagataacggcgataaggtgggtacgcgcgttgagtatgcgatcgagctgtcggtcgacggtggtgcatacgcgcccgtggttaaaggtgctgtcgatgacaagaccaccaccctctatgagcgcagccaccgtatcgacctgccaaaagccaccaccggctggcaactgcgcgtgcgccggataacgcctgactcaacgacggtgaatgttgtggacagtatgcgcgttgaggcggtcaccgagatcatcgatgcgaagctgcgttaccccaacacggcgttgctctacattgaattcgatgcgaagcagttcccgaacggcattccgcaggtggtatgcaatccgaaggggcgcattattcgcgtgcctgatacctacgatccggaaacgcgcacctattccggcacctgggagggcgggtttaaatgggcgtggaccgataacccggcatggatttattacgatatcgtgctgaatgagcggttcgggcttggtcagaggattgatgcgacccagattgataaatgggagctgtaccgcatcgcgcagtactgcgatcagccggtgccggatggcaaaggcggcagcggtaccgagccgcgcttccggtgtaatgtctacatccaggagcgcaatgacgcctggacggtgctgcgtgacctggcgggcatcttccgcggcatgacctactggggcgacaacaagctgtatgtgctggccgacatgccgcgcgatatctggcacatctacaaccatgccagtgtggtcgacggtaagtttatctatgccgatcccagcgaaaccacgcgcaacaccgccgcgctggttaactggtccgatccggcgaatcactacaaagacacaccggaagtggtttatgacaacgatctggcgatgcgcttcgattacagccagctcgaactgacggccatcggctgcacccggcagtcagaggcaaaccggcgcgggcgatgggcgctgctcacgaatggcattggtgaggtggtgaccttcagcacgggtatggatgttccccctgtcggtgaggtgatcggcgtggccgcgaacgagctggccggcagggtgattggcggcagggtcagcgcggtaagcggtcgtaatatcacgctcgaccgtgccgcagatgtcagggccggtaaccggcttttcctcaacctgccctcgggtgttgcgcaggcacggaccgtgcaggcagtgaaaggcaatgtggtcacggtcaccacggcctacagcgaaacgcctgaggcggagtgctgctggggtgtggatgctgacgatctgtttatcgcgctctttcgcgtaaccggcacccgtaacaacgatgacggcacgtttgaggtgaccggtgcgacctataacccggatatttatgctgcggtcgataccggcgcccggctcgatgaacggccggtcagcgtcattccgccaggcgttcaggcaccaccggaaaacatcgttatcgacagctactcgacggtcagccagaacattgcgatcaccaccatgcgtgcggcatggaaacccgtcaaaggggcgattgcctatgaggctgaatggcgccgtgacagcggtaactgggtgagtgtaccccgcacctcctctcagggattcgaggtgccgggtatctacgccgggcgttatctggtgcgggtacgggcagtcaacgccagcgatgtgtcgtcgatatgggcgacatctgccgaggtcacactcaccgggaaagtgggcaatccgccgaaaccggtaggcttcaccgcctcggaaactgttgtgtttggtattgagctgaactggggattcccggcaaacacggatgacacgctgaagacggaaattcagtacagcctgaccggtaccgaagatgatgcgatgctgctggccgacgtgccttatccgctgcgcaggtatcagcagatgggacttaaggcaggacagattttctggtaccgcgcccagctggtggaccgtaccggcaacgaatccggatataccgactgggtccgcggccagtccagcaccgatgtgacggacattacagaggcagtgctcgagcagatcaaggacaccgacctgtttaaggacctgatcgagaacgctgttgaaagcagcgcgaaggttgcggaactggcagaagccgtgcggcagaatgccgatggtctggctgctgctgccgggtcgaataagcagatggcggaagccattattggcaatgctctggcgatcgcggatgtcgtcgtgcgccagtcagcccagcagggtgctaactccgcgaaattcgagcagctgcgcgaggtgatcgccactgaaaccgaggcgcgcgttacggatgtgatccgcctggaggcaaagacggatcagaacgccgccggcatcaccgaagtgcgccaggcgctggcaaacgaaaccgaggcacgggcgacagcggtcgatcagcttaccgcgcagacggaagagaataaggccagtgtcacagagctgacgcagaccgtgacggatctggactcgtccaccgcctcgcgttttgaggagatatcggcagagatcgcgggcatagacggcagtgacatcagaggggggatccagagcaattccatcgcgctgatcaccaccacgctggcgcaggttaatgatcgcacacgcctcagcgtgcagtacggcgacaataaggccgggattgagcgtgttgataacgtgatggccgatgccagccaggctgtcgcggagtcgctcaggtcgttggatgccagttccggcgccggcacggcaaacaccaccgactttgcgaaaaccatggctgacttctcgcaggtttcggccacgaaaatcaattccctcacggtaacggtaaacggtcagcaggcggcaatcgtccagaatgctcaggtttctgccgatatcaacaacaacctttctgcgatgtacagcatcaaggtgggtgtcgatgctaacgggcgccagtacgctgcaggcatggggatcggggtacagaatacgcctgcaggtatgcaggctcaggtgctttttgtggcagatcggttcgccgtaatggcccaggccggaggcacggtctcgctgccgttcgttatcgagaacgggcagacattcgtcaacgatgccttcttcagggatgccagcattcagttcggtaagatcaccgactcgctgaagtcggataactacgtcgcaggatctgcaggctggaatctgcctaaaagtggcaacgcggagtttaatcaggtgacggtgcgcggctcgatttatgccaccaacggcaatttcaacctcaccgggccgggcaatacgactgtgattaacggggtgggcgtcacggttaatcttgcaaacggcggtcttataagactggggagctggtaa

SEQ ID NO: 398 - DNA, 759 bp, Kosakonia cowanii
  source 1..759: mol_type = genomic DNA
atgagtatttcatctgatgtccagaaactggagccgggcagccgtgtccgccttatcgaggttgacggcgaggcgttcggcgccggcattctgcggtttcataacgaaaccctccctcacacagaggccgagatcattgctgcgggcggcgatgcgtcgaagctccagccgaaatcggtctggtggcaggggctggagtacggtgcgtggccttttgaactgaccggcctgaccgtcagcagcgacgggcagagcgcccgaccaacactgaccgtggcaaatatcagcggcacgattggcgcgctctgtcgccgctttcaggggatggctaaggcaaaagtgattatccacgagaccttcgctcattaccttgatgcccgcaacttctccggcggcaatcctgccgctaacccgaatgaggagcgcaaacaggtttattacatcgaccgtaaatccagctcggatgatgaaaccgtggagtttgaactgtccagcccggcagacctgcggggacagctcatccccacgcggcagatccagcctatgtgtacctggtgcatgcgcgggtggtacaaaaccggcaacggctgtacctatgccgggcagaatggctggttcgataaggacggcaaccgggtggatgatccttcgaaggacgtgtgctcaggcctgttgtccaccgggtgtaaaccgcggttcggcgccaacaacgagctcgattatggcggctttccgggcgcgtcacttctgagggggtaa

SEQ ID NO: 399 - DNA, 600 bp, Kosakonia cowanii
  source 1..600: mol_type = genomic DNA
atggaaaaacgaaccgttatcaagctgagcgggtcgatggcgcagcttttcgggcgcacgcaccgccgggcgctgtcctctgccagcgaggttttcagggcgttgtccagcacggtggacggctttgaggattatctccgcgaggcgcgtgccagggggctcgacttcgttatcttccgcgatcgccggaacatcggtcaggaagagttttctcttctcggccccggcgatgagctgcgcattattccggtgatccgcggcagtaagcgtgccggcatcttccaggcggtgctcggggctgccctgattgccgggggtatcgcccttggccctgcaggagccgggctcatcggtaaaggggtcgcgctgaatgttgcgctggtcggcgcatccatggcgttgggcggcgtggtgcagctgctgtcgccgcaggtggcgggaatgaggatgcgtcaggatccggataacaagccttcctatgcgttcggcggcccggtcaacaccaccgccagcggcaacccggtacctcttctctacggccagcgggagatcgggggcgctgtcatttcagccggcatttacgcggaagatcagcagtaa

SEQ ID NO: 400 - DNA, 348 bp, Kosakonia cowanii
  source 1..348: mol_type = genomic DNA
atgaactttcctgaatctgtcgggccggtgccggttgtccgcacacctgacggctactggtgccaccccgcactgactgcattttaccgtgaccgggactgtgtcccgcaggctgaatatgaccactggctggcggacaacggcctggaggacacgctggtctgtctggatcctgacgaagacacgccggcggcgcaggcatatgcccgcaatgccgatatttcatactggacgccgcccgtacctgcaggtgagggctggtttaccggcgcgatattcgacgacgaggattacggtcccgcctgtatctggctgcgccggcgggaggtgccatgcgacgcaggctga

SEQ ID NO: 401 - DNA, 673 bp, Kosakonia cowanii
  source 1..673: mol_type = genomic DNA
atgccgcacttttttcgcatagatgcaagcgcgctccggcactctccctcaagtgtctggtcgttaatgcaaactccttccggagcgcgcttacatctgtgtggagataccagggcggttgcagctgcccgcttcattaagcgccctactctgttccgggcgtttattaaagcgaacccatttttattaatcgccagccggcgagggattcgtgcaaccaaaaatcgcgcgttgcagcgcgcaggagataccaacatgcgaatgaatgccaaagagctgatcgccgacgccagagtgacatcccctactctgccaccagcagcagcaaagttaatgaccgctatggcagaccgtctcgatgttcagttcgtggcgctgtgcgaatcgcggagcgaggcgaagcatctggctggagagaatgctgttatgaagtcggctattaagactcatagcgaatcggtccacttctgcgtgggttgtgggcaagatgatccatgcagcaatgatgatatttgccacgtcctcgaagaaacacccgccaccgatgcattccttgccaaccagtgcgcagaaacggtggattcagcagtaggtttgctacgcattctgtttaaccaccaagcgcctgtattggagaacgtgacaagcgctttacaagcctttgcagctcagc

SEQ ID NO: 402 - DNA, 777 bp, Kosakonia cowanii
  source 1..777: mol_type = genomic DNA
atgcgaatgaatgccaaagagctgatcgccgaagccagaacgacagcccctactctgccaccagcagcagcaaagttaatgaccgctatggcagaccgtctcgatctacagttcgtggtgctgtgcgaatcgcggaacgaggcaaagcagctggctggagagaatgctgttatgaagtcggctattaagactcatagcgaatcggtccacttctgcgtgggttgtgggcaagatgatccatgcagcaatgatgatatttgccacgtcctcgaagaaacgcccaccaccgatgcattccttgccaaccagtgcgcagaaacggtggattcagcagtaggtttgctacgcattctgtttaaccaccaagcgcctgtattggagaacgtgacaagcgctttacaagcctttgcagctcagctccgctgtaaatcagttgctccatccggattcgaccaggctcctgttcgtccgtcaataactgcgcttacagttgagcgcaatcagtatggctactggactcatccagtttatgaagaattctgtgacggtcgcgagtatatctccaacgaagaattcaacgtctggatgaaggataacgggctcgaatggaaagttgactatcgggatgaagaagctctcgacccggaagttgatggttatgacctctcgacgtggcagccagaagcgccagcgggtgaaggctggttcgttggttccattcacgatacagacgatggtgcagtttgcatctggttgcgcaataaggcaggcgaataa

SEQ ID NO: 403 - DNA, 620 bp, Kosakonia cowanii
  source 1..620: mol_type = genomic DNA
atgatttacacaactggctccatcgcggtcagcggcaacacgctgaccggcaccggcacgaatttcacacaggcaggctctcttatccgtaacggctgcacggtgctggcgctgaccagcccggcgcaggccttccagattaccgcaatcgacagcgcgaccagcctcacggtaaccccggcagccagcccggcgattcccgccggcacgaagttcgccattctgctgagcgacagcctcagcgttgacggtctggcgcaggatatcgccgagacattcaccatgtaccagcgttatatggggggctttgctgacgtgatgaacggagccggcgatgtgaccatcaccatcaatggcacacctgtgaccgtacccggccagaagtcgctggcaaagaaaggggctaacagcgatatcacctccctcagcggactcacgactgcgctcagcatcgcgcagggcgggacgggcgcaaaggatgctgccggggcgcgtgcagcgtttgatctggacaatctgtatctgcgaggagaccggaacctggcggacgtcaaaagcaaaaagaccgcgcgcgataacctgggcgtcaatgccagcccgaatatgtggtacgtatggca

SEQ ID NO: 404 - DNA, 479 bp, Kosakonia cowanii
  source 1..479: mol_type = genomic DNA
atgatttacacaactggctccatcgcggtcagcggcaacaccctgaccggcaccggcacgaatttcacacaggcaggctctcttatccgttccggctgcacggtgctggcgctgaccagcccggcgcaggccttccagatcacctccatcaacagcgcgaccagcctcacggtgaccccggcggccagcccggcggttaccgccggcacttcgttcgccattctgctgagcgacagcctcagcgttgacggcctggcgcaggatatcgccgagactctcaccatgtaccagcgttatatggggggctttgctgacgtgatgaacggggccggcgatgtgaccatcaccatcaacggtcagcccgttactgtacctggtcagaagtcgctggcaaagaaaggggctaacagcgatatcacctcccttagcgggctcaccactgcgctcagtattgcgcagggcgggacgggcgcaaagga

SEQ ID NO: 405 - DNA, 642 bp, Kosakonia cowanii
  source 1..642: mol_type = genomic DNA
atggtgcagtcgaaagccagtctcggttttaatctcttcctggcgaaaatggggattcaggatccggcacctgctattgatgggctgatgcgatatgcactggcgctgaaaaatccagtgctgggaaagctgagtgagaaggcacgcggtgaagttttgccggtgctggtgcagtttgcctatgcagattattcgcgttcggcagccagcaaatcgacctgcccacattgcgaagggaaaggcgtggtgcgggaaatgcaggacgtggttaagcaccctggcgttaatggtgtagaggcaacggttaagtacgaagccgtagaagtgatgtgtcagcactgcgcggggaaaggagaggttggcacggcctgccgcggctgtaaaggtaagggaaccgtgctggatgagaagagaaccaaactcctcggcgcacctgtcaggaaagtatgcggtcgttgcaacggataccgcttcagccgtttgcctacaacacttgcgcgggcgcgcatagagaagattattcccgatttgaccagctaccagtggtacagcggttatggcgatgtaatcgcgctgctggtgactaaatgctggcaggaagagacttttgctgagtcacaactgcgcagagtcacaagatag

SEQ ID NO: 406 - DNA, 657 bp, Kosakonia cowanii
  source 1..657: mol_type = genomic DNA
atggcagcgcagggcatggtgcaatcgaaagccagtctcggttttaatctcttcctggcgaaaatggggattcaggatccggcgccagctattgatgggctgatgcaatatgcgctggcgctgaaaaatcccgtgctggggaagctgagtgagaaggcacgcggtgaagttctgccggtgcttgtgcagtttgcttacgcagattattcgcgttcggcagccagtaaatcgacctgcacacattgcgaagggaaaggtgtggttcgggaaatgcaggacgtggttaagcaccctggcgttaatggcgtaaaggcaatggttaagcacgaagccgtagaagtgatgtgtcagcactgcgcgggaaaaggagaggtgggcacggcctgccgaggctgtaaaggaaagggaaccgtgctggatgagaagagaaccaaactccatggcgcacctgtcaggaaagtatgcggtcgttgcaacggaaactgcttcagccgtttgcctacaacacttgcgcgggcgcgcatagagaagattatccctgatctgaccagctaccagtggtacagcggttatggcgatgtaatcgcgctattggtgacgaaatgctggcaggaagaggcttttgccgagatgcagctgcgaaaagtcacaagatag

SEQ ID NO: 407 - DNA, 252 bp, Kosakonia cowanii
  source 1..252: mol_type = genomic DNA
atgaaaatgcttaacgctgcggcggttatgctggtttcgttaatggcatcaggctgcgccagcaacacgcccccgctgtgctataacggggcggtggtgatgaaaagccgggtgacggtaccggtattcggcataagaaaaccggtcagcgccaccgaatatctctccggcggcagcttcggttatcagtgggttgagcggagtgcttttacggataccgcgtcctgcgacagactgccgctgacggagtga

SEQ ID NO: 408 - DNA, 954 bp, Kosakonia cowanii
  source 1..954: mol_type = genomic DNA
atgcagatgtttattgcaggtaccagctttgacgccatcaacgccatggcggccagttatgttctggatgtcatcaccatcaccggtaccgggagtaaaacctactccctgtccggggtggaactgacgtatgccatcgtgaatgactttatgggagggcagttaaccggggcaacctacagcgtcagtgtcagcggattaaccgtgtcgtggaacgttaataatgccgtcaccctgattgtgtacggcagcccggtggcgggcacgcagagtgactattttggctttcagctcttccagtacctgaacgggatgaggacggtcaaactggcgccgaattatgtcccgttgtgcctgcgggaaatcattgatgtgcctgccggcgcgcgtactgtgcagacacaggttccggcgggtaacccggtcatgtgctttcaccggcataccggagcggcaatggatatctgctggtggaagcccgccacggtcagcgggtatcacgcgcttcagtttcccactgacggcagcaaccagaccgggtgccgggtgtatgtgttttcgaatattctcgcgaacactccggattacgggttctatctttaccgcgacgggcagatggtctggcacagcaactgccttccccttcaggttattccgctcacaaacggggatatcaccactgatacgccgctggcggtgtcgtccagcgtcacggcgcatatctttgtgccgcaggacccggcttacccgacggggtacagcaactttatgtgtgcatctgcgggaaatgacgggacccggtataaggtgcaggtgggaaaagtattccagagcacctttatcagcagtcccgacgagggcaggcgaatgagagggtgggcatgtggcggagtggggtatatcgaaacgcagttctatgaccagtactacagatatgcccttggcctggcctga

SEQ ID NO: 409 - DNA, 348 bp, Kosakonia cowanii
  source 1..348: mol_type = genomic DNA
atgaaccttcctgaatctgtcgggccggtgccggttgtccgcacacctgacggctactggtgccaccccgcactgactgcattttaccgtgaccgggattgtgtcccgcaggctgaatatgaccactggctggcggacaacggcctggaggacacgctggtctgtctggataccgatgatgacacgccggcggcgcaggcctatgcccgtaatgccgatatttcatactggacgccgcccgtacctgcaggtgagggctggtttaccggcgcgatattcgacagtgaggatgacggtcccgcctgtatctggctgcgccggcgggaggtgccatgcgacgcaggctga

SEQ ID NO: 410 - DNA, 615 bp, Kosakonia cowanii
  source 1..615: mol_type = genomic DNA
atgactaaacagataaacgatacccccacgagggggccttccgaccatagtgtccgtgatcaggttgttgacgcagccactgagcatttcggccactacggctacgaaaaaaccacggtctccgatctcgccaaagcgatcggtttttcaaaggcttatatctataagttttttgattctaaacaggcaatcggcgaagttatctgctcaaaccggctggcgatgatcatggaaattgttaatgctgcgattgcggatgcgccgacagctgctgagaaaattcggcgattattcagagcattatcagaatccggcagcgatttgttttttcgtgaccgtaagttgtacgacatcgcggccgttgcggcacgtgataactggccttcagcgcaagcgcatgagcaacgtctgcgtcagcttattgaacagatcattgttgaagggcgtgaggctggtgagtttgaaagaaaaactccccttgacgagactgctgatgcgatttttatggtcatgcgaccttatatcagcccggtgcagctgcaatataatctggaaactgccccggccgcagccgcattactgccctccctgatcctgagaagtttgtccccttga

SEQ ID NO: 411 - DNA, 1110 bp, Kosakonia cowanii
  source 1..1110: mol_type = genomic DNA
atgttcaggcttaaacctgccacttttgctgtttgcctgctgccgtttgcacttgtggcctgcggcgacgcttcagataacagtgatccccgcagcctgccacccctggtcaggtctgccgcagcgatcaacgcaaaccattcttcccgcgcttttacaggggtggtggttgcacgtatccagagcgaccttggtttcagggtacaaggcaaaatcctggaacgtctcgttgataccggtcaggccgtgaaacgaggccagccgttaatgcgtctggaccctgtggatctgagcctgcaggctcaggctcagcaacaggctgtcgctgcagcaaaagcacgcgcccgacagacagcagacgacgaatcgcgatatcgcggtctggtcactaccggagctgtatcggcctccgcttacgatcagattaaagccgcggcagatacggccagggctgatctcagtgccgcccaggcgcaggcgaatgtggcgcaaaacgccatgagctacgcagtcctggtggccgatgatgacggggtggtcatggatacgctggccgaacctggtcaggtggtcagtgccggacaaccggttatcagacttgccagagccggtcagcgcgaagcggttgtccagttgcctgagacgctacgtccgtccccaggaagcacggcacaggcttctctgtacggcagcgataaacagcccgtttccgcgacactgcggttactctcggatgccgccgatccgttgacgcgcacgttcgaggcacggtatgtgctgaacggcccgttgtctggtgccccactggggtccactgtcaccattcatattgcgcagggcagagcatcgcagccgttgctgcaggtgcctttagccgccgtttttgatgcgggtaaaggcccgggtgtctggagcatttctggaaaccccgccagagtggcatggcgtccagtacaggtcgtcagcctcggggatgatgcggcaagcgtgaccggcagccttaagcctggagaacaggtcgtggcgctgggggctcatctgctgcatgacggtgagacagtccggctggcgaagcagagcgatgtcagtgtcgccgggagccagccatga

SEQ ID NO: 412 - DNA, 3111 bp, Kosakonia cowanii
  source 1..3111: mol_type = genomic DNA
atgagtagtggacgtttcaatctttccgcgctcgctgtgcgtgagcgttcagttacgctgtttcttattctgttaattaccgttgccggcattctctcgttccttggactggggcgcgcagaagacccgccctttacggttaagcagatgaccatcatttccgcctggcccggagccacagctcaggaaatgcaggaccaggtggccgaaccgctggagaagcgtctccaggaactcaagtggtatgaccgcaccgagacctacacgcgccccggcctggcttttaccatgctctcgttgcaggacagtactccaccttcagaggtccaggaagagttctatcaggcacgtaaaaaactcagcgatgaagccaggaacctcccagccggggtaattggtccgatggtcaacgatgagttctcggatgtcacgtttgcgctctttgcgctgaaagcaaaaggagagccacagcggctactggttcgtgatgccgaatcattacgccagcgcttattgcatgtacccggggtgaaaaaggtcaatattatcggcgagcaggctgagcggatttttgtctcattttctcatgaccgtctggcaacactgggtatctcaccgcaggatatctttgcagccctgaacaaccagaacgtgctgacgcctgccggttcaatagacactcgtggtccgcaggtttttatccgtctggatggggcgtttgacaagctggagaaaattcgtgaaacgcctgttgtatcacagggaaggacgctgaagctttctgatgtcgcgacagttgagcgtggctacgaagatccggcgacctttatggtacgtaaccagagtgagcctgcgctgttgctgggtattgtgatgcgtgagggctggaatggtctggatctgggtaaagcgctggataaggaagcggccagcatcaatgcggatatgcctctcggcatgacatttacgaaagtcaccgatcagtccgttaacatcagctccgccgttgatgagttcatgatcaagttttttgtggcgctgctggtcgtgatggtggtctgctttctcagcatgggctggcgcgtgggcgtggttgtcgctgcggctgtgccactgacactggctgtcgtctttgtgatcatggaagcgtcaggtaaaaacttcgaccgtattaccctgggctcgcttatcctcgcgctcggtttactggtggatgatgcgatcattgccattgaaatgatggtggtgaagatggaagagggttatgaccgaataaaagcctctgcttatgcctggagtcacactgctgcacctatgctggccggtacgctggtcacggccgtcggctttatgcctaacggttttgcacaatccacggcgggtgaatataccagcaacatgttctggattgtgggaattgctttaatcgcctcctgggttgtggcagtggtctttacgccgtatctcggggtgaaaatgctgccagatatcaaaacggttgaagggggacatgatgctatctacaacacccgacgctataaccgttttcgtcagttgctgacgcgagtgatcgcacgaaaatggctggttgcgggtgcagtcgtcgcggtattcaccgttgccgttcttggcatggcactggtaaaaaaacagtttttcccgacgtctgatcggccagaagttcttgtggaagtgcagatgccgtacggcacctctattgaacaaaccagcgcggccgtaacgaaaattgaggactggctcaggcgccagaaagaggcaaaaattgtgacggcttatatcgggcagggttcaccacgtttctacctcgccatggcaccggaactgcccgatccctcttttgcgaaaatcgttgtcctgaccgacagccaggaagcccgtgaggcgctcaagtttcgtcttcgccaggctgcggctgacgggctggcaccggaggcgcgggttcgcgtgacccaactggtctttggcccgtattcaccctacccggttgcctttcgtgtgacagggccggatccgacggtattacgggacattgcagataaggtgaaaacgctgatgcaggccagcccgttgatgagaacggtcaacacggactggggctcacgcgtgccgacactgcatttcaccctgaatcaggatcggttgcaggcggtggggctgacctcaaactcggtggcccagcagcttcagttcctgctttcgggtgttccggtcactgctgtacgtgaagatatccgttcagtgcaggtcatgggacgtgctgccggcgatatcaggcttgatccagcgaaaatagctgactttaccctggtcggctccgcagggcagcgtatcccgttatcgcaggctggcgaggtcgaagtgcggatggaagatcctgttctgcgccgtcgtgatcggatgccaaccattaccgtgcggggtgatatagctgaatcccagcagccgccggatgtctccactgcaattatgaagcaactgcagcccatcatcacaacacttccggatggataccgtattgatgaagctggctcgattgaggagtcagggaaagccaccaaagcgatggcacccttattcccaatcatgatagccatgacgctgctgattattatcctccaggtgcgctcaatgtcggcgatggtgatggtctttatgaccgcaccgctggggctggtgggggtagtgccaaccttactgctcttcaatcagccctttggcatcaatgcgctggttggtctgattgctctgtcagggattttgatgcgtaacacgctgatcctgatcggccagattcaccataacgagcaggaaggtcttgcgccctttcatgcggtcattgaggcaacggtacaacgttccagacccgtattgctcacggcgatggcggccattctggcctttatcccgttaacacattcggtgttctggggaacccttgcctacaccctgatcggcgggacactgggggggaccattattacactggtgttcctgcctgccatgtatgccatctggttccggatcaagagccccgattcaaactcgtcaacggaaaaccgttccgcttctggaggattaaaaaatgtctga

SEQ ID NO: 413 - DNA, 489 bp, Kosakonia cowanii
  source 1..489: mol_type = genomic DNA
atgacacgaattggcattcttggagtaaatgatctgactgacaccattctggtcgaattgttccgtcttgatccttgcgctcatgtttttctatcatccgtggagcatgagcgcgcaaacctgctggcaaggaagtttccgtgctggattcaggatgacgttcaggcggtaattaacgaagcagatatcattatcattacgacaggaacatcttcccctgaaaacccatcggaaaaaatcgagtaccgaaaatcacaattaatcttttttttggaagcatggccatcaataaacaatcaggtgttttcaccccatacggataaaaaaataaattttacaaccagacatgtagcgctggctaatatttcaccattcattcatctaacagaagtacagattgatgactatctttttattcttaaagtcctgttggttgcaatgaaacccgtgcatacacttgatgtcaatttcagatcgtcttctgaataa

SEQ ID NO: 414 - DNA, 384 bp, Kosakonia cowanii
  source 1..384: mol_type = genomic DNA
atgaacaggaaagcgtttataaatgatttaatatcatggataaataataacattgagtcacatctgaaaattgatgatgctgccataaagtccggccattcgaaatggcgcttacaaaggctgtttttagcggagaccgggcagactcttggtcagttcatcagagagaaaaagttagttctgattgctgataaacttatttcctcaaatgagccactgattaacctggccataaattatgtttttgactctcagcaatcatttaccaaagcgtttcataaaaagtatcaactacccccccaaaaaaatatagaaagaaatttaaccgtcagcatagtaacgttttttatttcgacggaaagtaaaataactataataacataa

SEQ ID NO: 415 - DNA, 810 bp, Kosakonia cowanii
  source 1..810: mol_type = genomic DNA
atgtctgaacataaagtcgttctgattaccggtgtttcatcaggtattggcagggcggcagccctggccttcaaggccagaggttgtcaggtatttggtaccgtcagggatatcaacagcgcttccccgttgaatggaattacgctgacagaaatggatgtgcgggatgaacattcggtgcaacaggcaattgaaagagtgatagccaaagccggatgtattgatgtcctggttaacagcgcgggtgtgtccctggttggggcagttgaggaaacctcagtggaggaagccacccggctgtttgataccaatttctttggtgcattacgtacgaccagagctgtgctgccgcacatgagaagccagaaaagcggacgtatcgtgaacgtcagctccgtgctgggctttctgcctgcgccctttatgggcatttatgcagcctccaaacatgccctggaaggcatgtctgaaacacttgatcatgagctacgtggaagcggcgttcgtgtcacgctggttgagccttcttttacaagaacaaaacttgatgtcaactccgctgaaacggcagaaaagatagcgttttataaggatgcacgggaccagactctgggggccatactgaaaaaagccggtacggcgtccttacccgaggttgtggcaggggcaattgtggccgctacacttggcccatggaaaatgcgctataccccaggaggtgaagccacactgcttgccagattacgccgctttgcgccagcaagtatggtcagtaaaggactaagaaaaacctttgaaatgaaagaatag

SEQ ID NO: 416 - DNA, 489 bp, Kosakonia cowanii
  source 1..489: mol_type = genomic DNA
atgcgcctgaatgccaaagagctgatcgccgaagccagagtgacagcccctactctgccaccagcagcagcaaagttaatgaccgctatggcagaccgtctcgatctacagttcgtggtgctgtgcgaatcgcggaacgaggcaaagcagctggctggtgagaatgctcagatgaagtcggctattaagactcacagcgaatcggtccacttctgcgtgggttgtggcaaagatgatccatgcagcaatgacgatgtttgctatgcactcgaggaaactccagccactgatgcattcctcgcctcgctgcgagcagaagcaattactgacgctctggaaaatagctctgaatatctcgacaccgactgcgttagggatcgacatgacatcagttatgaagatgcggaattgcgcgcagctggtgcgatggagttgcgcgattcgttgcttgttgtagcaaaccagcttcgcaatggagtgcaatcatga

SEQ ID NO: 417 - DNA, 348 bp, Kosakonia cowanii
  source 1..348: mol_type = genomic DNA
atgaaccttcctgaatctgtcgggccggtgccggttgtccgcacacctgacggctactggtgccaccccgcactgactgcattttaccgtgaccgggactgtgtcccgcaggctgaatatgaccactggctggcggacaacggcctggaggacacgctggtctgtctggataccgatgatgacacgccggcggcgcaggcatacgcccgcaatgccgatatttcatactggacgccgcccgtacctgctggtgagggctggtttaccggcgcgatattcgacgacgaggattacggtcccgcctgtatctggctgcgccggcgggaggtgccatgcgacgcaggctga

SEQ ID NO: 418 - DNA, 1260 bp, Kosakonia cowanii
  source 1..1260: mol_type = genomic DNA
atgatttacacaactggctctattgcagtcagcggcaacacgctgaccggcaccggcacgaatttcaccgcagcaggctccctcatccgtaacggctgcacggtgctggcactgaccagcccggcgcaggcctttcaaatctcctcagtagacagcgctaccagcctgaccgtgtcacctgcggcatcagtacctgccggtacaaaatttgccatcctgctgagcgacagtctgagcgtggatggccttgcacaggatatcgccgagacgttcagcatgtaccagcggtacatgggcggttttacggatgtgatgaacggcagcggagatgtgaccatcaccatcaacggtcagcccgttaccgtgcccggtcagaaatcgctggcgaagaagggggctaacgccgacataaccagtctgaacggactgacaacagcgatcacacttgctcagggcggtaccggcgcaaagacggcagcaggagcacgcaccagtctggggctgggaagtatggccacccagagttctgacgcggtaaacataactggtggatccgggacattcaccagccttagctctgacgcggtgaccatcaccggtggaacagcttctcttggcactatcgagacaaaagcgggtgcggagcagccactggtaatacgcaccgctccgagtgggcttggctatatacgtttcagggatgcgtctgaaaatccactggcttatctgggattcggagcgagtggtgcccagcactttattctggcgagcaacatcggagtaaatagcgtcacgctgaatactaccggcgctgtgacagtgaaagcagggggcgctaactacgctttccagacaaacggaaccgctacggggcagctgtggcaaagcacatccgatgtcaggatcaagaaggatataaagcccatcaccaatgcgcgtgaggtaatcagtgcaatcagcgggtataccttcaagaagagatacaacctttatgacgtcgccgaaccgctttataccgaagaggcggggatccttgcccaggagcttgagctggtggctccggaagcagtctcaaaaaatgatttcggcgcccacgacctcgaaaacaatccgattgatgatttacgcgcggtcaactatgcggggatcacaccctacctgatagagctggcgaagctacatgaggccgagatttccggtttgaagggagaagtggcagagcttaaggcactcgtatcttccctcgcgcagggctcttga

SEQ ID NO: 419 - DNA, 708 bp, Kosakonia cowanii
  source 1..708: mol_type = genomic DNA
atgcgtcagaaaactattgatgccattttggcacatgccgctgctgaatatccgcgcgagtgctgcggcgtggtggctcagaagagccgtgtcgaacgttatttcccgtgccggaatcttgctgcggcgccggaggataattttgttctttgtccggaagattacgccgctgctgaggactggggtacggtgatcgccgtcgcacacagccaccctgacgccacgacacagccgagtgaactggataaagcgcaatgcgatgcaacgcttttgccctggcatatcgtgagctggccggagggggatttacgcaccatccagccgcgcggagaactgccgctgctggagcgaccgtttgtactcggtcacttcgactgctgggggctggtgatgagctattaccggcagacacacggtattgagctgcatgattaccgggtggattatccctggtgggaaaacaactatccggacaacttttacgaggaatgctggtacgagtgcggcttccgtgaatttgatgggccaccaaaacctggcgatatggtgatcatgcaggttcagtcggataagtggaatcacgcgggaattctgctggagggcaatatgctgctacatcacctgtacggtcacctgagccagagagtgccctatggcggctactggcgtgaaagaactatgaaggtactcaggtacaaatcgctatga

SEQ ID NO: 420 - DNA, 339 bp, Kosakonia cowanii
  source 1..339: mol_type = genomic DNA
atggcaattgaggaatttacatggtttccgcgcattaatgcgcagcaggaggtgacattccggacgcgcaccgcgcagtttggcgacggctataagcaggtgtcaggggacggactcaatcccagatcgcagaaatggacgatggagtttaccggcgatgaagcctatatcacagctatcaaagcgtttctggatcgccacggcggcacccggtcattttcgtggcgcccgccccttgagccgctgggactctaccgttgcaacacctatacgccgacgccgcttggcgccagaaaatataacctctccgcaacttttgaacaggcctttgccccatga

SEQ ID NO: 421 - DNA, 3513 bp, Kosakonia cowanii
  source 1..3513: mol_type = genomic DNA
atggctacgctgcgcgaactcatcatcaagatctcggcaaattcccagtcatttcagaccgagattgcccgtgcgtcgcggatggggcaggactattaccgtgtcatgcaaaacggtggccgtcaggctgccgctgctgcgcgtgaaagcgagagagcgctgtcagatttaaccagtggtcttgcatccgccggcagggcggcggcggcggcttctgccgctttcgccaccgggaagatcgttcagatcgctgatgaatggacatcggtgaatgcgcggttacgtcaggcttcagcatcctctgacgacttcgccaactctcagcgccggctgatgtctatcagccaggctaccggtaccgcttttaccgataatgccaacctgttttcgcgcgctgcagcctctatgcgtgaattcggttacagctctgatgaagtgctgaaagtcacggaagctgtcagtacgggtcttaagctgtccggtgccagcaccgctgaagccggatcggtgatcacccagttcagtcaggcactagctcagggcgtattgcgtggcgaagagtttaatgccgtcaatgaaagcggggaccgcgttatcagggcgctggcggctggcatgggcgttgcgcgtaaagatctaaaatcaatggcagatcagggaaaactgaccatcgatgttgttgtccctgccatcatcagtcagctcggcactctccagggcgagttcgccgcgatgccgcagacggtttccggatctgttgaaaaagttgcaaactcctttatggcctgggtgggcggtatcagccaggccaccggcgccaccgatatgttatccggcggtcttgatggtcttgctgccacgctcgacagcctgacctcctccgctgttaccggtgcgctgaacgatgtcgccgacaatatggcgacgataaccactgttgccggggcactggttggtgtggggcttgctaaatatcttggcggtattgttaccagtgccaccggcgccaccacctctcttattgcggcagcaaaatcagaagtggcactcgccgtggcacaggacagagcggcgcagtcttctgtggccgcggcacgcgccgacgtgtatcgcgcgcagcaggcactacagcgcgcaaaaagcgctgatgttcaggcggcccagcaggagcgtgtcgccgcggcagaagcgaaagtgacagcggcacaggcccggctgacggcagcacaggccagcggcacagcaacggagaaagtaaaggcgcgttccgcactggagcgtgcgcaggcggcactcgttgccgctaaaagtactgatgcccaggcagtggctgaacgacgtctggccgctgcgcagacaggactcaacaacaacatcgcaaaccgcgtgaccgcccagaataacctgaacggcgtgaccagcgtcggcacccgacttcttggcggcgccatggggctgattggtggcattcccggactggtaatgcttggtgccggcgcgtggtacgcgatgtaccagaatcaggagcaggccagacaatccgcccaggaatacgcaaaaaccattgatgaggtcagccggaaaacacgggcaatgactctgcccgaagcagaggataatcgcggcaaaacagtccaggcgctcgtggagcagaaccggctgattgacgagcaggaaaaagccattgctgctgttaaaaggcagcttgatgacctgaataaaacgcgcgggcagccggggatgaccggtgataacgatctcaacatcgttaaagcgatggggcttctgaccgatcagctgaccgttgaagaagataaactcaaccagatgcgcgagaaatcgcgcggtattcagcaggctctcgaagcgattgagcggcgcagaaatgatttaattcgtgagcatgcctggcggcagaatgcgcaataccagtctctgctgatgatgaacgggcaatatgaggacttcaacaggctgctggggcttggaaatcagttactggcttcgcgcagccagttgattaaagcgccttttgccatcctgcaggcgccggtatctgataatgataaacaggcgctgctacaaaaacagcaggcggcggagctggccgggttaaccggtctggacaaaattaaccgtcaggtcgattttgaactgcagaaactgggcaagaccggccctgagaactcgaaattcgccgcgggatggcggcaggctgcaattgatgagtacaacaaatcccagaatcttgctgctgcacaaaaggcgcaggccgaggccacacgcgacgccggtaaggcacagcgggaagctgcgcaaactgctgagcagtacagccgtaaaatcgccgatctcagtgtcgcaatcgaagtgcagaaagtcagggctaaagagggtgagcaggcagcagaactttacgcagccgctaaccagaccggggcaaaatggacggaagagcagcgcaccgcgatacgcgctcagtctgctgagctggccagactgacccagcttgcagacgatcatgtccgcaagatccgtgaacaggctgatgcgctgaaagacctccgggaagcgagccgtaaattcagtgacgaggctgagtttgctgctgagacatccgggatgggggatcgtcaaaagcaacggtatgaagaaacacagcaggttgagcgcgtctattcaaaaactgatcagagtgctcaggctttccatgaaaaagaaatggcgctggccagcctcgataaaaaataccgggaaattgcagcgtctgaatctaactggcgaaacggtgtatcgcgcggctataacagctggttcgatgagatgacgaacatcgcggggaccgtctctgatggtgtgaaatcgtcgcttgatggcgcattcagtaacgtcacctccatgctcgagggaaacaaagtctcctggaaatcctggggcatttccgtcctgcagatcattgaaaaaatcgcactgcagatggcggttgtcagtgctatgggcagcgtttcatcatcttccggactgattggatcgcttgtgggcggcgtaaccagctttttctcgggaggcggtgcaggtgcttcacctgcaggtcagtcattcgcagtaccttctttcaccccaaatgcgctgggtggcgtatacgattcgccctccctgagtacctacagtaacggcatctataactccccgcagttttttgcttttgcacagggcgcaggggtgtttgcggaagccgggccggaggccatcatgcccctcactcgcgcttccgatggctctctcggcgttcgcgcggttggttcaggcgtgaataacgtgtcgaccaccggtgccgcacctcaggtgaatgtctatatcacggaaagcgggaacaagagtacggcgacgccgggttacgaacagcttgggcgggaagcgggtgcatttatcgatcgccgctaccgggagcttatcggtcgtgatctggcacctggcggcaatatctggaatctggctaaaggtaatcgctga

SEQ ID NO: 422 - DNA, 3759 bp, Kosakonia cowanii
  source 1..3759: mol_type = genomic DNA
atggcacacgctaccgtaatcagaggccgcaagggcggcggttctaaatcacgcacgcctactgaacatcctgacgatcttcagtctgtcgccaaggcgaaaatcctaatcgcgctgggagaaggtgaattttcaggccagttaactggcagggacatttaccttgatggtaccgcgattgagaatgctgacggcacgcagaactttagcggggttacctgggagtttcgtgccggcacccaggcgcagaaatacattcagggaatacccggtaccgaaaacgaaatcaatgtgggtacagaagtttccagctcgattgcctggacacgtacatttaccaatacccagttgtcagccgttcgcctgcgcctgaagtggccctcgctttttaaacaggaggatgatggcgatctggtgggaaattcagtcaaatatgcaattgacctgcagaccgacggcggcgcatggcggactgtactgaataccagcgtaaccgggaaaacaacctcaggttatgagcgcagccatcgaatcgatctccctcaggcgggcagcacctggacaattcgccttcgaaaaatctcagctgatgcaaacagcgcgaagatcggcgatacgatgctgctgcagagcttcaccgaagtaatcgatgccaagctgcgctatccgaacaccgcgctactgtatgtagaattcgactcaagccagtttaatggctccatcccgcagatttcctgcgagccgcgtgggcgcgtaatccgcgtgccggatacctatgatccggaaacccgcacctatagcggtacctggacgggcgcttttaaatgggcgtggaccgataatcctgcctggatattttatgatctggttgtatctgaccggtttggtctggggcaacgactcaccgcggcaaacatcgataagtggacgctgtatcaggtggctcaatattgcgatcagaaagtgccggacggtaagggcggcagtggaaccgagccacgatacacctgtaatgtgtatgtgcaggatcgcaatgaggcttatacggtattgcgtgactttgccgccatattcagaggtatgacttactggggcggtgatcaaatcgtcgcgctagctgacatgccgcgtgatgtggattacagctatacccgcgctaacgtcgttggcggtcgtttcgcctattcgagcagcaccactaaaacccgctacaccactgcgctggtttcatggtccgatcctgataacgcctacgccgatgctatggagcctgtctttgagcaggcacttgttgcgcggtacggcttcaatcagcttgaaatgacggctatcggctgcaccaggcagtcagaagcgaaccgaaaggggcgctggggtattctgaccaacaacaaggatcgcgttgtgtcgtttgatgtcgggctggatggaaacattccgcagcccggctacatcatcgccgtggctgacgaaatgctgtctggcaaggttatgggtggacgcattagcgccgtcaacggcagggttatcactctggatcgtaaacccgatgccgtcgccggcggtcgacttatcctcaacctgccttcgggtgcttctcagagccgtaccattcaggtggtgaatggtaaatcagttacggtgacgacggcttacagcgagacgccacagacggaagctgtctgggttgttgagtcaggtgagctatatgcacagcaatatcgcgttgtgagcgtaagtgataatggtgatggtactttttcgatctctggtgcctggcatgatccggataagtatgcccgcatcgataccggagcggtcattgaccagcgaccggttagcgtcattccccctgggaaccagactccaccggccaacatcgtaatcagctctttctcggtggtgcagcagaacattagcgttgaaaccatgcgggtgagctgggatcaggcgcagaatgctatcgcctatgaagctcagtggcgccgcaacgacgggaactgggttaacgtgcctcgcagctccacgacgtcattcgacgtgccgggtatttatgccggtcgctatctggtgcgtgttcgtgccatcaatgccgctgaaatttcctccgggtggggctattcagaagaaaaaacgctgaccgggaaagtgggcaatccaccgaagccggtgggattcatcgcttctgattccgtggtgtttggtatcgagctgaactggggcttcccggcgaataccgacgacacgctgaagacggaaattcagtacagcctgaccggcagtgctgacgatgccatgctgctggccgacgtgccttatccgctgcgcaaatatcagcagatgggcctgaaggccggacagattttctggtaccgcgcgcagttggtggaccggaccggtaacgaatccggttataccgactgggtacgcggccagtccagctccgatgtgaccgacattacagaggccgtgcttgaggagatcaaggataccgaacttttcaaagacctcatcgagaacgccgttgagagcagcgcgaaggttgcggaactggcagaagccgtgcggcagaatgccgatggtctggccgctgctgccgggtcgaataagcagatggcggaagccattattggcaatgctctggcgatcgcggatgttgttgtccgccagtctgcccagcagggcgctaactccgcgaaatttgagcagctgcgcgaagttatcgccaccgaaacagaggcccgcgttacggatgtgatccgcctggaggcaaagacggatcagaacgccgccggcatcaccgaagtgcgccaggcgctggcaaacgaaaccgaggcacgggctactgctgtcgatcagcttactgcgcagacggaagagaacaaagccagtgtcacagcgctgacgcagaccgtgacggatctggactcatccactgtctcacgttttgatgagatatcggcagagatcgcgggcatagacggcagtgacatcagagggggaatacagagcaactccatcgcgctgattaccaccacgctggcgcaggttaatgatcgcacacgcctcagcgtgcagtacggcgacaacaaggcgggaattgagcgtgttgataacgtgatggccgatgccagccaggctgtcgcggagtcgctcagatcgttggatgccagttccggcgccggcacggcaaacaccaccgactttgcgaaaaccatggctgacttctcgcaggtctccgcgacaaaaatcaactccctgtcagtgacggtaaacggtcagcaggcggcaatcgtccagaatgctcaggtttctgccgacatcaacaataacctgaatgcgatgtacagcatcaaggtgggcgttgatgccgctggccgccagtacgctgcaggcatggggatcggtgtgcagaataccccgtctggcatgcagtcgcaggtcatttttctggcagaccgtttcgctgtgatgtcgcaggcaggcggaacggtgagcctgccgttcgttatccagaacgggcagacattcatcaacgaggccttcatcaattacgcgtcgatcaccctcgctcgcgtgggctcctggtattcagcaaattacgtggccgggcagaccgggaccatcatgaaggcggacgggacgtttgaggtcaacggtgcggtatctggtcagggacgcatgcagataacgaataaccgcatcatttcttacgatgcgcaaaaccggccagcagccgttatggggcaacgcttataa

SEQ ID NO: 423 - DNA, 756 bp, Kosakonia cowanii
  source 1..756: mol_type = genomic DNA
atgagtttaaacagtgattatcagaagcttgagcccggtgatgaggtcaggctttatgaagtcgacggcacgacctttggtacaggtgaggtcctgcgttttcacagctacagcctcgcgcataccgaggctgaaattgccgctgccggcgggaatgaaaataagctgccggcaaaatcaatctggtggcagggagaagagtataaagcgtggccctgcaagattgagggcattgaagcatctaccagcgggagcagcgcgcagcctaaattatcagtagcgaacctcgacagttcaattactgctctgtgcctggcctatgacgacatgttgcaggcgaaggtgactatccacgataccctgggcaagtacctcgatgctaaaaacttcgctggcggcaacccttcagccgatccgacgcaggaaaaacttaaggttttctatatcgatgccaagtccagcgaaaccaatgagatggtcgagtttacactcgccagcccgatggacctgcaggggctgttgataccgacgcgccagctccacttcctttgcacctggtgcatccggaataagtaccgcaccggcgacggttgtgactatgccggatcccgctatttcgacaaaaacaataatcctgtcagcgatccgtcgctggatgagtgcaacggtacgctgacggcctgcaaactgcggttcggtgaaaataacgagctctcgtttggtggcttcccgggcacgtcgttgatcaggagctga

SEQ ID NO: 424 - DNA, 609 bp, Kosakonia cowanii
  source 1..609: mol_type = genomic DNA
atgactgaaataatgaccagaattgaactaggcggtgtcctgggcaaaacattcggcaaagttcatcaccggattgtcagtaccgcacatgaggcaactcgtgcactgtctgccacagttgaaggctttgagcagtttatgatctccagccaaaggcgtggattaacctatgccgttttcaagggtaaaaaaaatataggtctggatgatttgggttttcccgtatctggtgaagttatccggattgtacctgtgataattggtagtaaaaaagccggccttttacagacgattttgggagccgtgcttatcacggcagctgtattggctggccctggcggtattggtgccgcgtttactgctggtggcttaacgggtttcgctgcagctactggcgtatcgctggctatcggtggggttatccagcttctttcccctcagccaaaaggtttagccagtaaacagagcgcagataaccgcgcatcctacgctttcggtggagttacaaacactgcagcgcagggctatccggtaccgctcctttatggacgccggcggataggcggggcgattatttccgccggaatttacgtcgaagaccagcagtaa

SEQ ID NO: 425 - DNA, 1146 bp, Kosakonia cowanii
  source 1..1146: mol_type = genomic DNA
atggctgctagaccacgttcacataaaatctcagtacctaacctttactgcaagctggataaacgcacggggaaaatatactggcaatataagcatcctctttccggacgcttccatagccttggaactgatgaggccgaggcaaagcaagttgccacagaagcaaatatgattattgcagagcagcgcacccgccagattcttagcgtgaatgaccgacttgccaggatgaaaggcaagcgaaccgatatcacggttacagagtggctggacaaatatatggccattcaagaagaacgactcaaacacaatgaattacgtcctaattcattcaagcaaaaaaataaacctgttcgtctgtttcgtgaacattgcggtttgcaacatttgaaggatattaccacccttgatattgccgagataactgatgcaataaaagctgaaggacataaccgcatggcgcaagtagtgcgtttggtgttgatagacgtctttaaagaagcgcaacacagcggccatgttccgcccggatataaccctgcgcaggcaactaagcagccgagaaataaagtcaccagacaacgactttccctagatgaatggaagaagatttacaccagcgctgaacaacaagagccttatcttcagtgcgggatgttactggctttgattacaggccaacgtttgggagatatctgtaacatgcaatttaaagatatttgggatgacatgctgcatgtggaacaggaaaaaacaggctcgaggctggcgatccctttggatttgaaatgtgatgcgataggcctgagtctcagggacgttatttcgaagtgtcgcgacgctgttgtcagtaaatatctggtgcatttcaggcatacatctgcccaagcaactagaggagatcaggtttctacaagttcactcacatccacttttaaaaaggcgcgagataaaagtggtctcaattgggataaagggacagcccctactttccatgagcaacgttctttatcggaacggctatacagagaacagggtgtagatacgcaaaaactcctggggcataaaacacagaaaatgacggacagatacaatgatgaccgagggaaagactgggtggtagtgagcgcaaaaacagggtcgtga

SEQ ID NO: 426 - DNA, 252 bp, Kosakonia cowanii
  source 1..252: mol_type = genomic DNA
atgaaaatgattaacgctgcggcggttgtgctggtttcgttaatggcatcaggctgcgccagcaacacgcccccgcggtgctataacgaggctgtggtgatgaaaaaccgggtgtcggttccggtattcggcataagaaaaccggtcagcaccaccgaatatctctccggcggcagcttcggttatcagtggattgagcggagtgcttttacagacacctcggcctgcgacaggctgccggtgactgagtga

SEQ ID NO: 427 - DNA, 954 bp, Kosakonia cowanii
  source 1..954: mol_type = genomic DNA
atgcagatgtttattgcagggaccagctttgacgccatcaacgccatggcagcaagctacgtactggatgtcatcaccattaccggcacagggagcaagacctactccctttccggtgtgtcgctgacatacgccattgtgaatgattttatgggagggcagttaacgggcgcgacctacagcgtcagtgtcagcggattaaccgtatcgtggaacgtcaataatgccgtcacccttattgtgtacggcagcccggtagcaggcacgcagagtgactacttcggcttccagctgttccagtatataaacggggtgaggacggtcaagctggctccgaattatgtgccgctgtgcctgcgccagattatagatgtgccggccggcgcgcggaccgtgcagacgcaggttcctgctggtaacccggtaatgtgttttcaccgccacaccggtgaggcgatggatttgtgctggtggaagcccgtcacggccagcgggtatcacgcgctgcagttccccactgcggcaagtaaccagaccgggtgccgggtgtatgtattttcgaatattctcgcgaatatcccggattatggcttctttctctaccgggacggacagatggtctggcacagcaactgcctcccgctgcaggtcattcctctgactaacggggatatcaccagtgccacgccgctggcggtgtcatcgagtgtcacgtcacatatcttcgtgcctcaggatccggcatatccgacgggatacagcaatttcatgtgtgcatcagcgggaaaagacggggctgcatataaagtgcaggtcgggaaagtattccagagcacctatatcagcaaccccgatgaaggaaggaggatgagagggtgggcatgcggcggtgtcgggtatatcgacacccggttctatgaccagtactacaaaagtgcgctgggcatcacctga

SEQ ID NO: 428 - DNA, 540 bp, Kosakonia cowanii
  source 1..540: mol_type = genomic DNA
atgttctgtcgcgagtacctcatcgattttaatgccacgcaagcggctattcgggcggggtacagcgtaaagatcgcccgcgcatcaggttgcgagaacctaacgaaacctgacatccaaaacagaatcgccgaattgaaagctgagcgcaacgagcaggttaatgttaatgcctcttatgtgctgaagcgcctgattgaaatcgaccagatggatgtgctcaacattatgacaaatgacatgagcattaagccggtttctgaatggctagcatcatggcgtcgttacatgagcgggttcgatctggctgatatgtttgaaggccgtggcgaagaccgtgaaatggttggcatcctgaaaaagattaaatggtctgacaacattaagaatctagggatgcattttgatccgctcggtatcaaatcaacagaaggcgtggacatctgctgggttgaagaggcgcagtctgtgtctactgactcgcgggatattttgattcccaccttccgtaaggggggcggaaattttgatgtcatttaa

SEQ ID NO: 429 - DNA, 472 bp, Kosakonia cowanii
  source 1..472: mol_type = genomic DNA
ggagcgtgaagtattcgacgcgccggaatcacgcgtaaatctggccggtctttcttcggcagcatcaccggaaaattccacagccgcagcagagccagcgcaggccgacactcagccagcgaccaacacagcggacttagccgaaaaatttcgtcaggccatcatcaatgcagatgctccggcagtcgtacagaccctgcggggtgagatcgataaaacaaaatccagtctcggtaccgcgctgtttgtcgagttaaaaaatcgcgccgttgcccggttctacctgctgaccgcgatcgaaaaactcaatcaggcaattaacgaactgcccaaacccggcgctgatggtgccagtgatgcattcgccgcgctggaacgcctgtacaccagcaacaaacgtcatctgggcgcagaactggaagaacagtacagcatcaccctggccgacatgaaacccgaatacgccgcataa

SEQ ID NO: 430 - DNA, 486 bp, Kosakonia cowanii
  source 1..486: mol_type = genomic DNA
atgcgaatgaatgcgaaagagctgatcgccgacgccagagcgacagcccctactctgccaccggcagcagcaaagttaatgaccgctatggctgaccgccttgatgttcagttcgcggcactgtgcgaatcgcggaacgaggcgaagcagctggctggagagaatgctctgatgaagtcggctattaagactcacagcgaatcggtccacttctgtgtgggttgtggaaaagatgatccatgcagcaatgacgatgtttgccacgccctcgaagaaactccagttactgatgcattcctcgcctccctgcgcgcgcaagcgattactgacgcactggaaaatagctcagactatctcgacaccgactgcgttatggaccggcatgacatcagttatcaagacgcagaattgcgcgcagctggtgccatggaaatgcatgattcgttggttgcagtagcaaaccatctccggaataaggcaggttaa

SEQ ID NO: 431 - DNA, 1269 bp, Kosakonia cowanii
  source 1..1269: mol_type = genomic DNA
atgatttacacaactggctccatcgcggtcagcggcaatactctgaccggtaccggcacgaatttcaccgcagcaggctcccttatccgtaacggctgcacggtgctggctctgaccagcccggcgcaggcattccagatcaccgccatcaacagcgcgaccagcctcactgtaactccggcagccagcccggcggtgcccccgggcacgaagttcgccattctgctgagcgacagcctttcggttgacggcctggcacaggatatcgctgaaactttcaccatgtaccagggctacatgagcggctttgccgatgttatgaaaggtgtcggcgacgtgacaatcaccatcaacggcgaaccggttaccgtaccgggacagaaatcactggtgaagaagggggctaacagcgatatcacttccctgagcggactcactactgcgctgagtatcgggcagggggggactggcgcaaaggatgctgcaggtgcgagaaaggcgcttcagcttggcggtgcggccacacttgaggttggtactgccgcaggcacagttgcagcgggaaatgatccacgactgaccactctggatggtaagtcaggtggttccatcaccgggcgaatttcgatgccttccggtaccgtcgggacttacctcagtgctgcccagaatgctggcgtcaggcagcgtgtggtaaacgacacatcagcgacgagcgcagtaggagcgctgacgtgggcgtataacaacggctctggttatcagctcgatacaacatggggttcggtgggccttggcgcgtcggcgtggccttacacatttatgatgcagaccgctaacgaaaccgattttggtgcgcgtatctggacgttctctatggcgacaggagacattatctgtagcggctccggtagccaggcgggtacgttcacttttacgaaagcctcgaactctgaccgggagatcaaacacgatatcgtgtataccgacgggcaggaatcgtacgagaacgttaaaaaatactcacccacgtcattcgtctataacgacgatccgcagggcagaaagcgtcgcggggtaattgcacaggatgtgcaggagatcgacccggaatatgtacgcgccatccttaacccttttacgatgaaaaccagcctttctctcgacactaacgtcatgcttcttgatgtggcgctggccctgaaagtggctatctcaaaaatcgaggcactggaagatacggtacaacagctgcgctatggctcctga

SEQ ID NO: 432 - DNA, 711 bp, Kosakonia cowanii
  source 1..711: mol_type = genomic DNA
atgcgtgacaagacaattagtgccattctggcgcatgcggcgcaggcgttcccggctgaatgctgcggcgtggtgatccagaaggggcgggttgagaagtatgtcgcctgccggaatctggccaccgccccggaggagcagtttgaactgtcaccggaggattacgcggcagccgaagatcagggcacggtggttgctgtggtgcacagccaccccggcgacggcgccacgacgcagccgagtgaactcgacatgctgatgtgcgacgcgaccgaagtgccgtgggtgatcgcttcatggcctgaaggcgatatccgcactatcatgccgcgcggcgatcgcccgctgaccgggcgtcagtttgttctcgggcatgctgactgctggtcccttatccgggattacttccgcactgaacacggtatcgcgctgcccgactacagcgtcgatcgtcactggtgggaggagggcgaaaacctctatatggataactggtacgactgcggtttcagggagttcgacggcccctcccgacccggcgatatggtcattatgcaggtgcaggccagcgtgccaaatcatgcaggcgtcctgctggagggcaacatgctgctgcaccacctgtacggacagctcagccagcgcatgccgtatggcggctattaccgtgatcgcaccatcaaagttttacggtacaaggatctgatgtaa

SEQ ID NO: 433 - DNA, 339 bp, Kosakonia cowanii
  source 1..339: mol_type = genomic DNA
atggcagttgaaaccttctcctggtgcccgaaggtggcggcgcaggcagacaccagtttccgcacccgtaaggcgcagttcggagataattacgcacaggtagccggggacggcattaacccggtcaccccgcaatggagcgtgagttttaccggggatgaagcgtatgttctggacataaaggcgtttctgaatcggcatgccggctggaagtccttcgtctggaaaccgcccctggagcccgcggggttatggcggtctgaatccctccagatagccacccacggcgcagatctttacaccctcagcaccacattcattcaggcataccatccatga

SEQ ID NO: 434 - DNA, 3492 bp, Kosakonia cowanii
  source 1..3492: mol_type = genomic DNA
atggcaacgcttcgcgaacttattataaaaatttcggctgactccagttctttccagtctgagatcacccgcgcctctcgcatgggttcagactactacagaacaatgcaggcgggaggtcgccaggcagcggcagccgctaaagaaagtgaaagggcgttatctgatctcactaatggatttgcctcggcaggtaaagctgccgcaaccgctgcagcggcctttgctacagggaagctggtgcaaattgcggacgaatggaactcagtgaatgctcgccttcaacaggcttcgtcttcggctgatgattttgcgacatcgcaacgtcagcttatggagatcagtcagcgaaccggtacagcgttctctgataacgcctctctttttgcacgggccgcggcatcaatgcgcgagtatggctacagctcggaagaagtgctcaaaattaccgaagccgtttcaaccgggctcaaactttccggcgccagcacgcaggagtcaagttcggttattacgcagtttagtcaggcacttgctcagggcgtattgcgtggagaagagtttaatgcggtcaacgaggcgggtgatcgtgtcatccgcgcccttgctacaggcatgggcgttgcgcgcaaagacctcaaaagtatggccgaccagggaaagctgacgatcgataaagtggtaccagcactaatgagccagcttggggcgttacagggtgagtttgcaacgatgccgcaaactgtttcaggctcattgcaaaaggtcactaactcgttcatggggtgggttggtggtgttaacgcagcaacgggtgccacagatgcgctttccggtggccttgatggcatagcccagacactggactcctttacttcatccgcggtcagcggtgctctgagtgacgtggctgacaatatgtcaaccatcaccacagtcgcaggcgctctagtaggggttggtctggctaaatacctcggcggaattgttaccagcgccacaagtgcgacaggtgctttgatctctgcggctaagtccgaagttgccctagctgtagctcaagacaaagcggcccagtcagctgtggcggcttcaagagctgacgtctatcgtgcacagcaagctttgcagagagcaaagggcgctgatgttcaggctgctcagcaggaaaaaatagcagccgcagaggcaaaggtaacagcagcacagtccaggctcacgacggctcttgccggaggtacagcaacagagaaagtcagggcaagagcagcgcttgagcgtgctcaggcaggtcttacagcagctaaaaatgcggacgtacaggccgttgctgaacgacgactggcacaggcagaggccgcgcgtgacaggaatctggccaaccgtgtctcaacccaaagcaatctaaacagtgtaaccgctgtcggatcgcggctcatgagtagtgctctgggagttatcggtggtattccaggtctggtgatgcttggcgcaggagcatggtatgcggcctatcagaatcaggaacaggctcgccgttctgctcaggaatacggaagaacgatagatgagataagcaaaaagaccagggcgatgtctttgccggaagcttccgacaatagtgaaaaagccaaaaaagctcttgatgaacagaacagacttatcgatgagcaaaaaagcaaaatcgaaagtctgaaagtacaaattgccggatcgcagtatctaatcaataaccctggtccgacaactaaaggtggtttcatgataaaccaccttacatctatgaagactgtaactgatgaactgtctactgcaactgagcagttgtcagttgaacaggaaagactttctcagatgcaggagaaagcagcctccattcaacaagcacttgagggatttcagtaccgtcgggtttcactgattagggaggaggcggcacaccagaacgcagcttatcagtctctgctgatgatgaacggtcagcatcaaacatttaaccagcttctcgggctcggcaatcagttactgatggcccgtcagggaatgacactggcacccctgcgtgttcctcaggctgaagcctcgcagaaacagaccgatgcgctcgaaaaaagccggcgcgaactggccctgtcccgcctgaaaggcgaggcaaaagagcgcgcacggcttggctatgctgctgatgaactcggcctgacggctgatccgcaattccagaccaaccgccttgagtacatcaataatgggcttgaagaatggcgcaataacgaggccaacaaaaaacagcccaaagggccaaagacggatgaagaaaaggccgctgacgcttataaaaggatgattaagcagcagaaggagcagatcgccctgcagggccagagcaccgaacttgccagggttaaataccaggtggttgaaggtgaactgtccaccctggacaaggcgcagaaggctgaactgatgcgcaacgcggccttaatcgatcaggttaaactgcgtgaacagctgcgtaattacgaggcaaatctggctgacagcaacgccagcgcccgggcggccaatgatgcgcagctcattggttacggtcagggcacccggttccgtgagcggatgcaggagcagtttaatatccgcaaggagtttgagcagaagaataccgatctgctccggcagcggcaggccggggatattgacgaaactttctaccagcaggggctggcactcaacagacgctatctggaagagcgactgcgcgaccaggaggggtattacaccgcttccgatgcacagcgcggtgactggttaacgggcatgtctgagggctatgcgaactgggtggacgaggcgaccgactattccgcgatggccgctgacgggatgaagcaggccatgggcggggcagtgaccaccattaccgacatgctcaacggcaatctcgacagctggaaagactggggcatgaacgtgctgaaaattatcgagaccgttctcgttaatatgatggtggcgaatgccgcgagttctatcggctcactcttcagctttggcgcttcttcagcagcaacagccagcagcgggacggccattcagagcgctgcctcaaacttcaccttcaacgccaaaggcggcgtctacgactcaccctccctcagtgcctacagcggtggtgtctaccagaccccacagctctttgcctttgcgaaaggggccggggtgtttggcgaagcaggtccggaggcaattatgccgctcacgcgcgcggcggatggttcgctcggcgttcgcgcagtcggcgcgccgcagttttccggcggtggtccgtccgtgtcgtttggcgatatcaacatcaacggcggtgcgcagtccacggcagggcagggagcagccgcaactgccggcaggcaactcaaggatgcaatcgtgacggtgattaatgagcaggccagcatgccgggctcgcctttgtggcggcttttgaaaggagcgtaa

SEQ ID NO: 435 - DNA, 3762 bp, Kosakonia cowanii
  source 1..3762: mol_type = genomic DNA
atgaccacgacaatcatcaaagggcgcaagggcggtggcactaagacccgcaccccggttgaagccccggacagtattcagtccatagccagagccaaaatcctcgtcgcgctcggcgagggggagttcgcaggcggcctggacgggcgcagcatttatcttggcgatgcgtcatcgtataccccgctgcagaatgccgacggcagttacaacttcaacaacgtaaaatatgagttccgctccggcactcaggaccagagctatattcagggctttccgggcgttgagaatgagctgcaggtcgcctacgaactcaaagctgccgtgccgtatgtgcgctctgtctccaatacccagctttcagccctgcgcatccgcctgggctggccctcgctgctgaaccagaaagataacggcgataaagtgggtacgcgcgttgagtatgcgatcgacctgtctgtcgacggcggcgcatatgacacggtggtcaatggcgctgtcgatgacaagaccactaccctttatgagcgcagtcaccgtatcgacctgccaaaagccacaaccggctggcaactgcgcgtgcgccggataacgccggattcaacgacggtgaatgttgtggacagtatgcgggtcgaggcggtcaccgaaatcatcgatgcgaagctgcgttaccccaatacggcgctgctctacattgaatttgacgcgaagcagttcccgaacggcatcccgcaggtcgtgtgcaatccgaaggggcgcattattcgcgtgcctgatacctacgatcctgacactcgcacctattccggcacctgggaaggcgggtttaaatgggcgtggaccgataacccggcgtggatttattacgacattgtgctgaatgagcggttcgggcttggtcagaggattgatgcgacccagattgataaatgggagctgtaccgcatcgcgcagtactgcgatcagccggtaccggatggcaaaggcggcagcggcacggaaccgcgttttcgctgcaacgtctacattcaggagcgcaatgacgcctggacggtgctgcgcgaccttgccggtatcttccgcggcatgacctactggggcgacaacaagctgtatgtgctggccgatatgccccgcgatatctggcacatctataaccacgccagtgtggtcgacggtaaatttaccttcgccgatccgagcgaaaccacgcgtaacactgccgcgctggttaactggtccgatccggcgaatcactacaaagacacgcccgaagtcgtttatgacaacgatctggcgatgcgcttcgattacagccagctcgaaatgacggctatcggctgcacccgacagtcagaggcaaaccggcgcgggcgctgggcgctgctcacgaacggcatcggtgaggtggtgaccttcagcacgggtatggatgttccccctgtcggtgaggtgatcggcgtggccgcgaacgaactggccggcagggtgattggcggcagggtaagcgcggtcagcggtcgtaatatcacgctcgatcgggccgcggatgtcaaagccggcaaccggctttttctcaacctgccgtcaggggtggcgcaggcacggactgtacaggcggttaacggcaatatcgtcaccgtcaccacggcctacagtgaaacgcctgaagcggagtgctgctggggcgtggatgcggacgatctgtttatcgcgctctttcgcgttaccggcacccgcgacaacgatgacggcactttcgaggtgacaggcgcgacgtacagcccggatatttacgccgcggtcgataccggcgcccggctcgatgaaaggccggtcagcgtcattccgcccggcgtgcaggcaccgccagaaaacatcgtcatcgacagctattcgacggtcagccagaacatagcgattaccaccatgcgtgtggcctgggattctgttaaaggggcaatcgcctacgaagccgagtggcggcgcgacagcggcaactgggtgagcgtgccccgtacttcctcccaggggttcgaggtgccgggtatctacgccgggcgttatctggtgcgggtgcgggcagtaaacgccagcgatgtctcgtccatatgggcgacatcagctgaggtcacgctcaccgggaaagtgggtaatccgccgaaaccggttggcttaaccgcctcggaaactgttgtgtttggtatcgagctgaactggggcttcccggcaaacacggacgacacgctgaaaacggagatccagtacagcctgaccggaaccgacgacgatgccatgctgctggccgacgtgccttacccgctgcgcaagtatcagcagatgggactcaaggccgggcaggttttctggtaccgcgcgcagctggtggaccggaccggtaacgaatccggttacacagactgggtacgtggccagtccagctccgatgtgacagacattacagaggccgtactcgcgcagatcaaggatacggatcttttcaaagacctcattgaaaacgccgtggagagcagccaggcagtcgcggacctggctgaggcagtgaagcaaaacgccgacggtctggctgcggcggccggggcaaaccgccagacggcagaagccattatcggcaatgcactggcgatcgccgacgttgtggtgcgccagtcagcccagcagggcgctaactcggcgcggttcgaacagctgcgcgaggtgatcgccaccgaaactgtggcgcgcgttaccgacgtgatccgcctggaggcgaagacagaccagaacacggccggtattaccgaggtgcgacaggcgctggcaaacgaaaccgaggcacgggcgacagctgtcgatcagcttaccgcgcagacggaagagaacaaggccagtgtcacagagctgacgcagaccgtgacggatctggattcctcgaccgcctcgcgctttgaggagatttcggcagagatcgcgggcattgatggcagtgaaatcagagggggaatacagagcaactccattgcgctgatcaccactacgctggcgcaggtcagtcagtccaaccgaatgagcgtgcagtacggcgctaacgccgccagtattcagcgcgttgatactgtgatggcggacgccagccaggccgttgccgagtcgctcaggacgctggatgccagcgcgggcggcggcacggcaaatgccactgactttgccaaaacgatggcggatttttcgcaggtctccgcgaccagaatcaactccctttcagtgacggtaaacggtcaacaggcggcgatagtccagaatgctcaggtttcggccgacattaacaataacctgaatgcgatgtacagcatcaaggtgggtgtggatgccaatggccgccagtacgccgcaggcatgggtatcggtgtgcagaacaccccggcgggcatgcagtcgcaggtgctctttgtggcggatcggtttgcggtaatgacacaggcgggcgggacggtgagtctgccgttcctggtgcagaacgggcagaccttcattaacgaagcctttatcaattatgcgtcaatcaccctcgcccgggtgggatcgtggtattccgccaactatgtggccgggcagaccggcaccatcatgaaggcggacggaacgtttgaggtcaacggcgcggtatcgggccaggggcgcatgcagataacgaacaaccgcatcatctcttttgacgcacaaaaccggccggcagctgttatggggcaacgcttataa

SEQ ID NO: 436 - DNA, 759 bp, Kosakonia cowanii
  source 1..759: mol_type = genomic DNA
atgagcatttcatctgatgtccagaaactggagccgggcagccgcgtccgccttatcgaggtcgacggcgaggcgttcggtgccggcattctgcggtttcacaacgaaaccctccctcacacagaggccgagatcactgccgcgggcggcgatgcgtcaaagcttccgccgaagtctgtctggtggcaggggctggagtacggtgcgtggcccttcgaactgaccggcctgtccgtcagcagcgacgggcagagcgccagaccaacactgaccgtggcaaatatcagcggcacgattggcgcgctttgtcgccgctttcagggaatggcgaaggcaaaagtgatcatccacgacacatttgcccattaccttgatgcccgtaatttcgccggcggtaatcctgccgctaacccgacagaggagcgcaggcaggtctattacatcgaccgtaaatccagttcggatgatgaaaccgttgagtttgaactgtccagcccggcagatctgcgggggcaactcatccccacgcgtcagatccagcccatgtgcacctggtgcatgcgcggctggtacaaaaccgggaacggctgtacctatgccgggcagaatggctggttcgataaggacggcaacccggtcgacgatccttcgaaagatgtgtgttcaggtctgctgtccaccgggtgcaagccgcgattcggggccgaaaacgaagtcgattttggcgggatgccaggcgcatcacttctgagggggtaa

SEQ ID NO: 437 - DNA, 600 bp, Kosakonia cowanii
  source 1..600: mol_type = genomic DNA
atggaaaaacgaaccgttatcaagctgagcggatcgatggcgcagcgtttcgggcgcacgcaccgccgggcgctgtcttctgccagcgaggttttcagggcgctgtccagcacggtggacggctttgaggattatctccgcgaggcgcgcgccagggggctcgatttcgtcatcttccgcgatcgccgcaacatcggtcaggaagagttttcgcttctcggccccggcgatgagctgcgcattattccggtcatccgcggcagcaagcgtgccggcatcttccaggcggtgctcggggctgccctgattgccgggggtatcgcccttggccctgccggagccgggcttattggtaaaggagtcgcgctgaatgttgcgctggtcggcgcatccatggcgctgggcggcgtggtgcagctgctttcgccgcaggtggcggggatgaggatgcgtcaggatcctgacaacaagccaagctatgcgttcggcggcccggtcaacaccaccgccagcggcaaccccgtacctcttctctacggccagcgggagatcggcggcgctgtcatttcagccggcatttacgcggaagatcagcagtaa

SEQ ID NO: 438 - DNA, 252 bp, Kosakonia cowanii
  source 1..252: mol_type = genomic DNA
atgaaaataattaacgctgcggcggttgtgctggtttcgatactggcgacaggctgcgccagcaacacgcccccgctgtgctataacggggcggtggtaatgaaaaaccgggtgtcggtgccggtattcggcataagaaaaccggtcagcaccaccgaatatctctccggcggcagcttcggttatcagtgggttgagcggagcgcttttacggatacctcgacctgcgacaggcttccgctgacggagtga

SEQ ID NO: 439 - DNA, 957 bp, Kosakonia cowanii
  source 1..957: mol_type = genomic DNA
atgcagatgtttattgcaggtaccagctttgacgccatcaacgccatggcggccagctatgttctggatgtgatcgccatcaccggcaccgggagtaaaacctactcccttgcgggagtggaactgacgtatgccatcgtaaatgactttatgggagggcagttaaccggggcaacctacagcgtcagtgtcagcggattaaccgtgtcgtggaacgtcaataatgccgtcaccctgattgtgtatggcagcccggtggcgggtacgcagagtgactattttggctttcagctcttccagtacctgaacggggtgaggacggtcaaactggcgcccaattatgtcccgttgtgcctgcgggaaatcatcgatgtgcctgccggcgcgcgcactgtgcagacgcaggttccggcgggcaatccggtcatgtgctttcaccggcataccggggcggcaatggacatcagctggtggaagcccgccacggccaacgggtatcatgccctgcagtttcccacggacggcagcaaccagaccggatgccgggtgtatgtgttttcaaatattctcgcgaacatacctgactatgggttctatctctaccgcgacgggcagatggtctggcacagcaactgccttcctcttcaggttaacccgctgacgaacggggatatcaccagcgacacgccgctggcggtatcgtccagcgtcacggcgcacatcttcgtgccgcaggacccggcttatccgacggggtacagcaatttcatgtgtgcatcagcgggaaatgacgggacccgttataaggtgcaggtgggaaaagtattccagagcacttatatcagcagtcccgacgagggcaggcgaatgcgggggtgggcttgtggcggggtggggtatatcgaaacgcagttctatgaccagtactacagatatgcccttggcctggccggatag

SEQ ID NO: 440 - DNA, 360 bp, Kosakonia cowanii
  source 1..360: mol_type = genomic DNA
atgaaacgtatgccggacaaagacgctggtttctgggcaagtcttatcgcctggctatacagccacaaaacagaatggggctatgcaggtgtggcgggcatgttttctttgctgcgcagtgcctatgcgcagtcctcatggagtaagcgtgttcttgacgccgtatcgtgcagcgcgctggcatttttcgccgcgccgacgcttcaggtagtcggtggtgttcttaactggaacgtgcccgatacagccgctcaggtgtttgcggtgtacatcgggtatgtcggcaatgactacatcagcgagaagctgcgcgggtggattagccgcagaacgggagataacagtgaaaatcagtcctga

SEQ ID NO: 441 - DNA, 453 bp, Kosakonia cowanii
  source 1..453: mol_type = genomic DNA
atgaacccgatcaacttcattaagaacaattcgcacatcatcgttatcggccttatttgcgttgcgctgtggggactgaacgcccgtaacgcccagttaacagccactaatgaacggctggaaaagctggcgaacagcaaagacgaccagattaacgatctgcgatcgaaaaatgacggcctggccgccagcgtgggtgagctggttaccgctgtcaggcagcagaaccaggtgatgtctcaggtcactgaacagcgcgctgtaaccgcacagcagaaccggaagctacagaatgaaattaagcaataccttgaagctgataagtgtgcccagtctcgcgttcctgacaatgctgctgaccggctgcgcgccgcagcaaaagctgcaggtggagtaccggacaataagccagccgcaaatcagcctgccggcagagctgacctcacgcattga

SEQ ID NO: 442 - DNA, 1461 bp, Kosakonia cowanii
  source 1..1461: mol_type = genomic DNA
atgatttacacaaccggctctatcgcagtcagcggcaacacgctgaccggcacaggcacaaacttcactgccgcaggctctctcattcgtaacggctgcacggtgctggcgctgaccagcccggcgcaggctttccagatcacctcagtcgacagcgcgaccggcctcacagtaaccccggcggccagcccttcggttcccgctggcgcaaagtttgccatcctgttgagcgacagcctgagcgtggatggcctggcacaggatattgccgagacgttcagtatgtaccagcggtacatgggcggttttgcggatgtgatgaacggcagcggagatgtgaccattaccattaacggtcagcctgtcaccgttcccggtcagaagtcgctggcgaagaagggcgctaacaccgacatcaccagcctgggcggactgacaactgcactgagcatccagcagggtggtacaggaggtaaaaccgcagcagaagcccgaaataaaattggcgcggcgagttccgggaataacagtgatattaccggtattaccggactgacgactgctctgagtattcagcagggcggaaccggggctaaagatgcctcccagggatggctgaatctgctgaacggcagaacaccggcaagcgcgcgaggcgatttacaactgggcacagctgctgtccgtgatgcctacagcacaaccggtgccatgctgtctgtgggggatttcggtctcggaggaaaaggaagtatacgaacctggaatgatactgcagtagtgggatacctcagggccggagccgcctctgaattctggagaaataatgcggataccgggcacacttatgcgggaggatgttgcctttatacggtctcttttgattcgttctttaatatttgcgtggggcagcgtgggcagggagtgcgcatatcatcaggtactactgatgcggtttcccttcaggtttacacggtttacacagataaaaacacgagcaaagcaagtgacggaacccttaaggccgcttctccggtggcgcgcatcgtaaaaagcaagaaagactgccagcgcactgatattgatgaagaaggattcagctggtgtggctgtggaacagcaaatgaagaagcggaggggatcagtgtctcccggctcgacacaggtgtgtatacccttacgggttctgcagggcttgcttcatccggctggcaactcctccctccccgcgacccgcagggatcgggtgatatggggattgttgaggccgaacagactgaaagcggtggtctgacgattaggctctacaagcggcgttatgttctcaccgacgatggtgacatcgaggtgcaaaaaggtgctgcgattgacgtacccgtaaacagctggattgatgtccgccttgatatgccagaaacaagtctctggaatcagcgcgctgccggcactaaggagcaataa

SEQ ID NO: 443 - DNA, 711 bp, Kosakonia cowanii
  source 1..711: mol_type = genomic DNA
atgcgggacaagacaatcagcgcgattctggcgcatgcggcgcagacgttcccggctgaatgctgcggtgtggtgatccagaaagggcgggttgagaagtatgtcgcctgccggaatctggctacctccccggaggagcagtttgaactgtcaccggaggattacgcggcagccgaagagcagggcactgtggttgccgtggtgcacagccaccccggcgacggcgccacgacgcagccgagtgaactcgacatgctgatgtgcgacgcgaccgaagtgccgtgggtggtcgcgtcatggcctgaaggcgatatccgcaccatcatgccgcgcggcgatcgcccgctgaccgggcgtcagtttgttctcgggcatgctgactgctggtcccttatccgtgattacttccgcactgaacacggtatcgcgctgcccgactacagcgtcgatcgccactggtgggaggagggcgaaaacctctatatggataactggtacgcatgcggtttcagggaattcgacggtccatcccggcccggcgatatggtcattatgcaggtgcaggccagcgtgccgaatcatgccggcgtcctgctggagggcaacatgctgctgcaccacctgtacgggcagctcagccagcgcattccgtatggcggctattaccgtgaccggaccattaaagttttacggtacaaggatctgatgtga

SEQ ID NO: 444 - DNA, 339 bp, Kosakonia cowanii
  source 1..339: mol_type = genomic DNA
atggcagttgagaccttctcctggtgcccgaaggtggcggcgcaggcagataccagtttccgcatccgcaaggcgcagttcggggataattacgcccaggtggccggggacggcatcaacccggtcacaccgcagtggagcgtgagttttaccggcgatgaagcgtatgtccaggccataaagtcgtttctgaagcggcatgccggctggaagtccttcatctggaagccgcccctggagcctgcggggctttggcggtctgaatccctccagatagccactcacggcaacgacaaatacaccctcagcactacattcattcaggcataccatccatga

SEQ ID NO: 445 - DNA, 3492 bp, Kosakonia cowanii
  source 1..3492: mol_type = genomic DNA
atggcaacgcttcgcgaacttattataaaaatttctgctgactccagctcattccagagtgagatcactcgcgcctctcgcatgggctccgactattacagaacaatgcaggcgggaggccgccaggcggcggcggctgctaaagaaagtgaaagggcgttatctgatctcactaatggttttgcctcagcaggtaaagccgcagctgcggcaactgcggcttttgctacagggaagctggtgcagattgcagacgaatggaactcagtgaatgctcgtcttcaacaggcttctgcttcggctgatgattttgcgacttcacaacgtcagcttatggaaatcagtcagcgcacgggtacagcgttctctgataatgccaacctcttcgcccgcgcagctgcatcgatgcgcgaatacggctatagctcggaagaagtgctcaaaatcaccgaagccgtttcaacagggctcaagctttccggtgccagcacgcaggaatcaagctctgtcattactcagtttagccaggcactggctcagggcgttttgcgtggcgaagagttcaatgcggtaaacgaatcgggtgatcgtgtcatccgtgcccttgccacaggcatgggcgtagcgcgcaaagatctaaaaagtatggccgaccaaggcaagctcactatcgataaagtggtgccagcattaatgagccagctcggggcgttacagggtgagtttgcaacgatgccgcagactgtttcaggctcattgcaaaaggtcactaactcgttcatggggtgggtaggtggtgttaacgctgcaacaggtgccacggatgcgctgtccggtgggcttgatggtgtagcccagacactggactcctttacttcatccgcggtgagcggtgctctgagtgatgtggccgacaatatgtcggttatcacaaccgtagcaggcgcgctggtgggcgttggcctggctaagtatctcagcggaattgttaccagcgccacgagtgcgacaggtgctttgatctctgccgcgaaatcagaagttgccctcgctgtagcgcaagacagggcagctcagtcagctgtggcggcttccagagctgacgtctatcgtgcacagcaagctttgcagagagcaaagggcgctgatgttcaggctgctcagcaggaaaaaatagcagccgcagaggcaaaggtaacagcagcacagtccaggctcacgacggctcttgccggaggtacagcaacagagaaagtcagggcaagagcagcgcttgagcgtgctcaggcaggtcttacagcagctaaaaatgcggacgtacaggcagttgctgaacgacgactggcacaggcagaggccgcgcgtgacaggaacctggccaaccgtgtctccacccaaagtaatctaaacagtgtaaccgctgtcggatcgcggctcatgagtagtgctctgggagttatcggtggtattccaggtctggtgatgcttggcgcaggagcatggtatgcggcgtatcagaatcaggaacaggctcgccgttctgctcaggaatacggcagaacgatagatgagataagcaaaaagaccagggcgatgtctttgccggaagcttccgacaatagtgaaaaagccaaaaaagctcttgatgaacagaacagacttatcgatgagcaaaaaagcaaaattgaaagtctgaaagagcagattgccggatcgcagtatctaatcaacaaccccggcccgactacgaaaggtggtttcatgatcaaccaccttacctctctgaagactgtaactgatgacctgtcgactgcaactgagcagttgtcggttgaacaggaaagactttctcagatgcaggagaaagcagcctccatccaacaaactcttgaggggctccagtaccgtcgggtctcgctgattagagaggaagcggcaaatcagaattctgcctaccagtctctgctgatgatgaacggccagcatcaaacatttaaccagcttctcgggctcggcaatcagttactgatggcccggcagggaatgacactggcacccctgcgtgttcctcaggctgaagcctcgcagaaacagaccgatgcgctcgaaaaaagccggcgcgaactggccctgtcccgacttaaaggtgaggcaaaagagcgtgcacggcttggctatgctgctgatgaactcggcctgacggctgatccgcaattccagaccaaccggcttgagtacatcaataacgggcttgaagagtggcgcaataacgaggccaacaaaaagcagcccaaagggcctaagacggacgaagaaaaggcggctgatgcatataaaaggatgatcaagcagcagaaggagcagatcgcccttcagggccagagcaccgaacttgccagggtgaaatatcaggtggttgagggtgagttgtccaccctggacaaggcgcagaaggctgaactgatgcgcaacgctgccttaatcgaccaagtcaaactgcgtgagcagctgcgtaattacgaggcgaatctggctgacagcaacgccagcgccagggcggcgaatgatgcgcagctcattggttacggtcagggcacccggttccgtgagcggatgcaggagcagtttaatatccgcaaggagtttgaacagaagaataccgatctgctccggcagcggcaggccggggatatagatgaaaccttctaccagcaggggctggcactcaacaaacgctatctggaagagcgactgcgcgaccaggaagggtattacaccgcttccgatgcgcagcgcggtgactggttaacgggcatgtctgagggctatgcgaactgggtggacgaggcgaccgactattccgcgatggctgccgacgggatgaagcaggccatgggcggggcggtgaccaccattaccgacatgctcaacggcaatctcgacagctggaaagactggggcatgaacgtcctgaaaattatcgagactgttctcgttaatatgatggtggcgaatgccgcgagttccctcggctcgctcttcagctttggtgcctcatccgctgcaacggccagcagcgggacggccattcagagcgccgcgtccaacttcaccttcaacgccaaaggcggcgtatacgactcaccctccctcagtgcatacagcggtggtgtctaccagactccgcagctgtttgcctttgctaaaggggccggggtgtttggtgaggcaggtccggaggcgattatgccgctcacgcgcgcggcggatggttcgctcggcgttcgcgcagttggcgcgccgcaattttccggcggcggcccgtccgtgtcgtttggcgatatcaacatcaacggcggtgcgcagtccacggcagggcagggggcagccgcaactgccggcaggcaacttaaggatgcaatcgtgaccgtaattaatgagcaggccagcatgccgggctcgccattgtggcggcttttgaaaggagcgtaa

SEQ ID NO: 446 - DNA, 3804 bp, Kosakonia cowanii
  source 1..3804: mol_type = genomic DNA
atgacgaacacagcgattaaagggcggaagggcggtagcaccaagacccgcaccccggtggaagccccggacagtattcagtccatagccagagccaaaatccttgtcgcgctcggcgaaggggagttcgccggcggcctggacgggcgcagcatttatctcggcgacgcgtcatcgtataccccgctgcagaatgcagacggcagttacaacttcaacaacgttaaatacgagtttcgttccggcacccaggatcagacctacattcagggctttcccggcgttgagaatgagctgcaggtcgcctacaagcttaaagctgctgtgccgtatgtccgttccgtctccaatacccagctttcagcactgcgcatccgcctcggctggccctcgctgctgaaccagaaagacaacggcgataaggtgggtacgcgcgttgagtatgcgatcgagctgtcggtcgacggtggtgcatacgcgcccgtggttaaaggcgctgtcgatgacaagaccaccaccctctatgagcgcagtcaccgtatcgacctgccgaaagccaccaccggctggcagctgcgcgtgcgccggattacaccggattcaacgacggtgaatgttgtggacagtatgcgcgttgaggcggtcaccgaaatcatcgatgcgaagctgcgttaccccaacacggcgttgctctacattgaattcgatgcgaagcagttcccgaacggcattccgcaggtggtgtgcaatccgaaggggcgcattattcgcgtgcctgatacctacgatccggaaacgcgcagttattccggcacctgggaaggcgggttcaaatgggcatggactgataacccggcgtggatttattacgacatcgtgctgaatgagcgcttcggcctcggccagaggattgatgcgacccagattgataaatgggagctgtaccgcatcgcgcagtactgcgatcagccggtaccggatggcaaaggcggcagcggtaccgagccgcgcttccggtgtaatgtctacatccaggagcgcaatgacgcctggacggtgctgcgcgacctggccggcattttccgtggtatgacctactggggcgacaacaagctgtatgtgctggccgatatgccccgcgatatctggcacatctacaaccacgccagtgtggtcgacggcaagtttacctttgccgatccgagtgaaaccacccgcaacaccgccgcgctggtgaactggtccgatccggcgaatcactacaaagacacaccggaagtggtttatgacaacgatctggcgatgcgcttcgattacagccagctcgaactgacggccatcggctgcacccggcagtcagaggcaaaccggcgcgggcgctgggcgctgctcacgaatggcattggtgaggtggtgaccttcagcacgggtatggatgttccccctgtcggggaagtgatcggcgtggccgcgaacgagctggccggcagggtgattggcggcagggtaagcgcggtcagcggtcgtaatatcacactcgaccgtgccgcagatgtcaaagctggcaaccggctcttcctcaatctgccgtcaggtgtggcgcaggcccggaccgtgcaggcggttaacggcaatatcgtcaccgtcaccacggcctacagtgaaacgcctgaagcggagtgctgctggggtgtggatgctgacgatctgtttatcgcactctttcgcgtaaccggcacccgtaacaacgatgacggcacgttcgaggtcaccggagcgacgtacagcccggatatttatgctgcggtcgataccggcgcccggctcgatgaaaggccggtcagcgtcatcccgcccggcgtgcaggctccaccggaaaatatcgttatcgacagctactcgacgattagccagaacattgcggtcaccaccatgcgtgtggcctgggattctgttaaaggggcaattgcgtacgaagccgagtggcggcgcgacagcggcaactgggtgagcgtgccccgcacgtcctcttttggtttcgaggtgccgggtatctacgccgggcgttatctggtgcgggtgcgggcagttaacgccagcgatgtctcgtccatatgggcgacatcagctgaggtcacgctcaccgggaaagtgggtaatccaccgaagccggttggttttatcgcttccgaaaatgtggtgtttggcgtcgagctgaactggggattcccggcgaacacggacgacacgctgaaaacggagatccaatatagcctgaccggcagcgatgacgatgccatgctgctggccgacgtgccttatccgctgcgcaagtatcagcagatggggctcaaggccgggcaggttttctggtaccgcgcgcagctggtggaccggaccggtaacgaatccggttacacagactggatccgcggtcagtccagctccgatgtgaccgatattacagaggccgtgctcgagcagatcaaggataccgacctgtttaaagacctcatcgagaacgccgtggagagcagtcaggcggtcgcggatctggctgaggcagttaaacagaacgccgacggcctggctgcggcggccggggcaaaccgccagacggcagaagctatcatcggcaatgctctggccatcgccgacgtggtggtacgccagtcagcccagcagggcgctaactcggcgcggttcgaacagctgcgcgaggtgatcgccaccgaaacagaggcgcgcgttaccgatgtgatccgcctggaggcgaagacagaccagaacacggccggtattaccgaggtacgacaggcgctggcaaacgaaaccgaggcacgggcaacagctgtcgatcagcttaccgcgcagacggaagagaacaaggccagtatcacagagctgacgcagaccgtgacggatctggattcctcgaccgcctcgcgctttgaggaaatttcggcagagatcgcgggcattgatggcaatgaaatcagagggggaatacagagcaactccatcgcgctgatcaccaccacgctggcgcaggttaatgatcgcacacgcctcagcgtgcagtacggtgacaacaaggcgggaattgagcgtgttgataacgtgatggctgatgccagccaggctgtcgcggagtcgctcaggtcgatggatgccagttccggcgccggcacggcaaacaccaccgacttttcaaaaaccatggctgacttctcgcaggtttcggccacgaaaatcaattccctcacggtaacggtaaacggtcagcaggcggcaatcgtccagaatgctcaggtttctgctgacatcaacaataacctgaatgcgatgtacagcatcaaggtgggtgtggatgcgcagggtcgccagtacgctgcggggatggggataggggtacagaattcgcctgcgggcatgcagtcgcaggtcatttttctggccgaccgtttcgctgtgatgtcgcaggcaggcggaacggtgagcctgccgttcgttatccagaacgggcagacattcatcaacgatggcttcttcagggatgccagcattcagttcggtaagatcaccgactcactgaagtcggacaattatgccgccggcgcagcaggatggaatctgccgaaaagcggaaatgccgagttcaaccaggtaaccgttcgcggcgcaatttacgccactaacggtaatttcaacctcacggggcccggaaatacgaccgttattaacgggcttggcgtcacggttaaccttgcaaatggtggtcttataaggctggggagctggtaa

SEQ ID NO: 447 - DNA, 759 bp, Kosakonia cowanii
  source 1..759: mol_type = genomic DNA
atgagcatttcatctgatgtccagaaactggagccgggcagccgtgtccgccttatcgaggttgacggcgaggcgttcggcgccggcattctgcggtttcataacgaaactctccctcacacagaggccgagatcattgctgctggcggcgatgcgtcgaagctccagccgaaatcggtctggtggcaggggctggagtacggtgcgtggccctttgaactgaccggcctgtccgtcagcagcgacgggcagagcgcccgcccgacactgaccgtggcaaatatctccggcacgattggcgcgctctgtcgccgctttcaggggatggctaaggcgaaagtgattatccacgagaccttagctcattaccttgatgcccgcaattttgccggcggcaatccgggcgctaatccgaatgaggagcgcaaacaggtctattacatcgaccgtaaatccagttcggatgatgaaaccgtggagtttgaactgtccagcccggcagacctgcggggacagctcatccccacgcggcagatccagcccatgtgcacctggtgcatgcgcgggtggtacaaaaccggcaacggctgcacctatgccgggcagaatggctggttcgataaggacggcaaccgggtggatgatccttcgaaggacgtgtgctcaggcctcttgtcgaccgggtgtaaaccccggttcggcgccaacagcgagctcgattatggcggctttccgggcgcgtcacttctgaggggataa

SEQ ID NO: 448 - DNA, 600 bp, Kosakonia cowanii
  source 1..600: mol_type = genomic DNA
atggaaaaacgaaccgttatcaagctgagcggatcgatggcgcagcgcttcgggcgcacgcaccgccgggtactgtcctctgccagcgaggttttcagggcgctgtccagcacggtggacggatttgaagattatctccgcgaggcgcgcgccagggggctcgatttcgtcatcttccgtgatcgccgcaatatcagccaggaagagttttcgcttctcggccccggcgatgagctgcgcattattccggtgatccgcggcagcaagcgtgccggcattttccaggcggtgctcggggttgccctgattgccggggggatcgcccttggtcctgccggggcagggcttattggtaaaggggtcgcgctgaatgttgcgctggtcggtgcatcgatggcgctgggcggcgtggttcagttgctgtcaccgcaggtggcagggatgaggatgcgtcaggatccggacaacaagccaagctatgctttcggcggcccggtcaacaccaccgccagcggcaatcccgtaccgcttctctacggccagcgggagatcgggggtgccatcatttcagccggcatttatgcagaagatcagcagtaa

SEQ ID NO: 449 - DNA, 759 bp, Kosakonia cowanii
  source 1..759: mol_type = genomic DNA
atgaacctcgaatcattaccgaaattttattccccgaaatcaccgaagcttaacgaccagacgccagcgaccggcggtgtcgcgcttactatcaccgatgtaatggcagcacagggtatggtgcagtcgaaagccagcctcggttttaatcttttcctggcgaaaatggggattcaggatccggcacctgctattgatgggctgatgcaatatgcgctggcgctcaaaaacccggtgctgtggaagctgagtgagaaggcgcgcggtgaagttctgccggtgctggtgcagtttgcctatgcagattattcgcgttcggcagccagtaaatcgacctgcccacattgcgaagggaaaggcgtggtgcgggaaatgcaggatgtggttaagcaccctggcgttaatggcgtagaggcaacggttaagcacgaagccgtagaagtcatgtgtcagcactgcgcgggaaaaggagaggtaggcacggcctgccgcggctgtaaaggtaaggggaccgtgctggatgagaagagaaccaaactccacggcacaccagtcaggaaagtttgcggtcgttgcaacggaaaccgcttcagccgtttgcctacaacccttgcgcgggcgcgaatagagaagattatccctgatctgaccagctaccagtggtacagcggttatggcgatgtaatcgcgctactggtgacaaaatgctggcaggaagaggcttttgccgaggtgcaactgcgtaaagtcacaagatag

SEQ ID NO: 450 - DNA, 615 bp, Kosakonia cowanii
  source 1..615: mol_type = genomic DNA
atgccaaaagagatgaacatcaatgcagtacgcggcccgtcggatcactcggttcgcgatcaggttgttgaggcagccaccgagcacttcggccactttggttacgaaaaaaccaccgtttccgatctcgcgaaagcgattggtttttccaaagcctatatctataaatttttcgattccaagcaggcgataggcgaagtgatatgcgcgaaccgcctggcgatgatgatagatatcgtcaacgccgctattgcggatgcgccgagcgcgtcggaacaacttcgccggctgttcaacgccgtggtgcaagcaggcagcgatctcttctttcacgatcgcaaactgtatgacattgctgccgttgccgcgcgtgacaaatggccctccgcgcaggcgcacgagcagcgtctgcgccagctcattgagcagatcgtcaaagcgggacgcgaggcaggagagtttgagcgtaaaacacctcttgatgaagccgcggatgccatctacctggtgatgcgtccctatatcagccccgttcagttgcagtacaacctggagacggcaccggctgccgctgttttcctctcttcgctgatcctgagaagccttgcgccttga

SEQ ID NO: 451 - DNA, 1110 bp, Kosakonia cowanii
  source 1..1110: mol_type = genomic DNA
atgctcaggctcaatcctgccaccttagctatttgcctcttgccgctggcgattgtcgcctgcggtgacaatggcaacagcgacgatccccgaacccagccgccgctggtgagaactgcccctgtcatgagtgcggtcgataacgcccgcgcgtttacgggtaccgtcgtggcgagaattcaaagcgaccttggttttcgtgtgccgggcaaagttcttgagcgccttgtcgataccggccagacggtcacgcgcggccagccgttaatgcgtctcgaccccgccgacttaagcctgcaggcggtcagcgctgcccaggcggtaagtgcagctcaggccagggtcagacaggcggcgagtgatgaagcgcgctaccgcagcctggttaccacgggcgcggtgtcggcctctgcctacgatcaggtcaaagcggccgcagagacggcgcgggccgatctgaaagcggcgcaggcgcaggccagcgtggcgcaaaatgcgatgcattatgccgtgctgctggcggatggcgatggggtggtgatggcgacgctggcggagccgggccaggtggtcagcgccgggcaggcggtggtcaggctggcccgttccgggcagcgtgaagcgattgtccagctcccggaaaccctacgcccgtcgctcggcagccgggcgcaggccacgctgtatgggcgtgctggtcaggctgtcccggcgacgttgcgactgctgtcggatgcggcggatccgctgacgcgcaccttcgaggcaaggtatgtgctgcagggcgcgctggcaagcgcaccgcttggagccaccgtcacgctcaacattaccgaaggtttgtcagccaagccgttactgcaggtgccgctggctgccgtttatgacgcgggaaaagggccgggtgtctgggaagtgtcaggcaaacccgcccgggtgagctggcagccggtagaggtggtgaatatcaccgatgatgccgcacgggtgatgggaaatttgcaacccggcgagcctgtggtcgcgctgggtgcgcatttgctgcatgagggtgaggcggtgcgacaggcgaaacagagcgacagcgaaatcgcagggagtcgcccatga

SEQ ID NO: 452 - DNA, 3087 bp, Kosakonia cowanii
  source 1..3087: mol_type = genomic DNA
atgagcggcggcagttttaacctctccgcgattgccgtgcgcgagcgcgctattacgctgtttctgattatcctcattactatcgccgggagtgtctccttcttaaaactggggcgggccgaggatccgccgtttaccgtcaagcagatgaccattatctctgcctggcccggtgcgacagcgcaggagatgcaggatcaggtagcggaaccgctggaaaaacggctgcaggagttgcaatggtatgaccggactgagacctatacgcgtcccggtcttgctttcaccatgctctcccttcaggacagtacgccaccttccctggttcaggaggagttctaccaggcgcgtaaaaaagtgggcgatgaagctaaaaacctgcctgccggggtaatcggcccgctggtcaatgatgagttctcggatgtcacgtttgcgctgtttgcgctgaaggccaaaggcgagccgcagcgcctgctggtgcgggatgccgagtcgctgcgccagcggttgctccacgttcccggcattaaaaaggtcaatatcatcggcgagcaggcggaacgcatctttatctccttctctcacgaccggctggcgacgctcggcatctccgcgcaggatattttcgccgcgctcaacgaccagaatgtgctgacgccggctggctccatcgatacccgcgggccgcaggtctttattcgcctcgacggcgcgtttgatacgctggagaaaatccggcaaacgccgctggtggcgcagggacgaacgctgaagcttgccgatgtcgccacggttgaacgcggttatgaggatccggcaacctttctggtgcgcaatcagggggaacccgcgctgctgctgggtgtggtcatgcgcgagggctggaacggcctggcgctgggcgaggcgcttgataaagaagccgccagcattaatgccgggatgccgcttggaatgtcattgaccaaagtaaccgatcagtcagtgaacatcagttccgccgtggatgagttcatgatcaagttctttgtggcgctgctggtggtgatggtggtctgcttccttagcatgggctggcgcgtaggcgtcgtggtggccgccgcggtgccgctgacgctggccgttgtctttgtgatcatggaagcgacgggcaagaacttcgatcgcattacgctcggctcgctgattctggccctcggtttgctggtagatgacgccattatcgccatcgagatgatggtggtgaaaatggaggagggctacgaccgcatcaaggcttccgcctatgcctggagccataccgccgcgcccatgctggcgggcacgctggtaacggctatcggctttatgcccaacggttttgcccactccaccgccggggaatataccagcaatatgttctggatcgtcggcattgcattgattgcctcgtgggtggtggcggtggtctttacgccctacctgggcgtcaaaatgttgcccgcgataaaaccgattgaaggggggcatgcggcgatctacaacacccgtcgctataaccagttccgtgggctgctggctcgtgtgattgctgcgaaatggctggtggcaggctcggtggttgtactgtttaccgttgccattctggggatggggctggtgaagaaacagtttttccccacctccgatcgcccggaagtgctggtggaagtgcagatgccttacgccacttccattgcgcaaaccagcgccacaacggcgaaaatcgaggcgtggctcaggcagcagaaagaggcggaaattgtcacttcctatattggccagggctcaccgcgcttttatctggcgatggcgccggagctgcccgatccttcgtttgccaaaattgtggttcgcaccggcagccaacaggcgcgcgaagcgcttaagtttcggcttcgtcacgccgtggcggatggtctggcgccggaggcgcgcgttcgagtcacccaactagtgtttggaccctattcaccctatccggtggcctttcgcgtgatgggaccggatccccaggtattacgtgacattgccgataaagtgaaaacggtgatgcaggccagcccgatgatgagaacggttaatacggactggggcgcacgggtgccgacgctacacttcacgcttgatcaggatcgcctgcaagcggtggggctgacctccagcgccgcggcccgccagcttcagtttctgcttaccggcgtgccgattacttcggtgcgggagaatatccgtgccgtggaggtcattggccgtgcggccggggatattcggcttgatccgggtaagatcgccggtttcacgctggtcggctcggccggtcagcgcattccgctgtcgcaggtcggggaggctgaggtgcgcatggaagagccgctgctgcgccgccgcgatcgggtgccgaccattaccgtgcggggtgatattgctgaatccctgcagccgccggatgtctccaccgccatgatgcagcaactgcagccagtgattgccgcgctgccggacgggtatcagattgaacaggcgggctcgattgaggagtccggcaaagccaccaaagcgatggcaccgctctttccgattatgatcgccatgacgctgctgatcatcattttgcaggtacgttcactctctgcgatggtgatggtgtttatgaccgcgccgctggggctggtcggcgtggtaccgacgctgctgctcttccatcaaccctttggtatcaatgcgctggtggggctgattgccttgtccgggattttaatgcgtaacacgctgattctgattgggcaaattcaccacaacgagcgggaggggctggcaccgtttgacgcggtgattgaagcgacggtacagcgtgcaaggccggtgctgctcacggcgctggcggcgatccttgcctttatcccgctgacgcattcggtcttctggggaaccctggcctacacgctgatcggtggaacactcgggggtaccattatcacgctggtgttcctgccagcgatgtatgccatctggtatcgcattaaccgccccgatccgcatgaagcgaagagggcagtgggttaa

SEQ ID NO: 453 - DNA, 252 bp, Kosakonia cowanii
  source 1..252: mol_type = genomic DNA
atgaaaatgattaacgctgcggcggttgtgctggtttcgttaatggcatcaggctgcgccagcaacacgcccccgctgtgctataacgaggctgtggtgatgaaaaaccgggtgtcggttccggtattcggcataagaaaaccggtcagcaccaccgaatatctctccggcggcagcttcggttatcagtgggttgagcggagtgcttttacagacacttcggcctgcgacaggctgccggtgactgagtga

SEQ ID NO: 454 - DNA, 165 bp, Kosakonia cowanii
  source 1..165: mol_type = genomic DNA
atgggcacgcagtggcgcacgggcatgggcggcatcaccgggctggattacaacgtgctgccctggctgatgaagctgaacggggtggaggatgaggcaaccgcgttaacggatatccgcgtaatggaaagcgcggcgctgaaaattatgcatcagggggcgtaa

SEQ ID NO: 455 - DNA, 219 bp, Kosakonia cowanii
  source 1..219: mol_type = genomic DNA
atgtccgcactcaataaagcaataaaagccgctggttcagccagaaagctcagcatcgcgcttggtgtgacgagtatgtccgtaagtcattggaagaatcgtgaccacgggatcgtcccgccaaactacatcttccccattttcaaaatgaccggcgtaactccccacgaactgcgcccagatctctacccaaatcccactgacggtttaccaaagtag

SEQ ID NO: 456 - DNA, 201 bp, Kosakonia cowanii
  source 1..201: mol_type = genomic DNA
atgaaagagacctggttctatcacctggaatgcaccacggagcaggcagaagagctgctggcgctataccgccgccgcggcgttaaggtcgagcgtagcctcaaccctgatctcatcacctggaccgtcagcgcccagctgccggagggcaatcatccgccgcgccctagtcgggtatggcaaagcaaggcgtggggttga

SEQ ID NO: 457 - DNA, 201 bp, Kosakonia cowanii
  source 1..201: mol_type = genomic DNA
atgacgttcttcatcgtctgggaagcatacacacgcgactggcaactgatgcagaagggctcacgcttcatgagcactgacgatcctgacatcattgatgttgatctcgccgactatgtggcatacatggcaaaagcactgggtattgaggagaaatacctcgtaatcacgtcggttcaatcgcttgggtttttgaactag

SEQ ID NO: 458 - DNA, 243 bp, Kosakonia cowanii
  source 1..243: mol_type = genomic DNA
atgccatttagcacgctgatcaaaaccataacaatttcaaatgctgtttcaggggatttcaaattcgagatttaccagaatgaaaaggctcttttccatgcggatatatcccgtaaaaatccactcggtaaatgggagcagttccgcaataagtttagatttagcaaagccttagacgttgaagaagttattgggcgttgtaaaaaacttgttgatgatcaattcgttgctgtgaaagagtaa

SEQ ID NO: 459 - DNA, 129 bp, Kosakonia cowanii
  source 1..129: mol_type = genomic DNA
atgacagggctaaaaatggtgaaagccgcgctggtgagacagcaacggctttcgggtgcaattaccgacagcaactgcgaggtcattatgacaaacgctcatttaaaacaccaggcgaaaggggcatag

SEQ ID NO: 460 - DNA, 1083 bp, Kosakonia cowanii
  source 1..1083: mol_type = genomic DNA
atgcagaggccagcccgttacgacgctaacctgccccgtaacctgacctttcgcaagagagataagctttattcctggcgcaacccaataaccggccaggtaatctatctgggccgcattgatcgcagggaagcgatagcccaggccattgaagccaacagctatcttgatcaaaactatatcccctccagtctacttcagcgcattaaagaaacgcccaccctgactatggctaaatggctggagaggtatgacgttattctcgagcgaagggaattaaaaccaaacacaatgaaagttcgcaggaaccagctggagacgatcagaaaagagttcggcactatcgctcttagcgcagttacaacaaaagacattgcggaatttttggaaacatacattgcctgcgataaaaaaagcatggctgcaggtctgagatctgtactgctcgatgtattcagagaggcgctcgtggagggccatatagaaaggaacccggcagaacctactcgcaccccggcaccaaaagttaagcgggaacgtctactgctcgaagcgtattttacgatacgagaaacagcagctgctaattcagtatgggcggcaaatgcatttgatcttgcgctggtcacggctcagcgacgcgaggatatagccatgatgaaattcactgacatccgggaagacagattgtttgtcatacaggagaaaacagggaataaattagccatccctttagacctgaaactggaagcggccgatcttcatttaaaagaagtgatagaacgttgcagagtgaacaatccatctgagttcctgctttactcgccggtgcgtcggggtggaagaaagcccggaccactgacgccggatgggttaacccaggcattctcagatacccgtgatgtcactgtgcttaaatttggcccttatccgccgtcatttcacgaaattagaagtctggccagcaggctgtatgagaaggaaaaaggcgaagaatttgcgcagaggctgttgggtcataaaaatttatcaatgaccaaaaaatacctggactcccgtggggctgagtatgttacggtttag

SEQ ID NO: 461 - DNA, 252 bp, Kosakonia cowanii
  source 1..252: mol_type = genomic DNA
atgaaaattattaacgctgcggcggttgttctggtttcgttaatggcatcaggctgcgccagcaacacgcccccgctgtgctataacgaggctgtggtgatgaaaaaccgggtgtcagttccggtattcggcataagaaaaccggtcagcgccaccgaatatctctccggcggcagcttcggttatcagtgggttgagcgaagtgcttttacagacacctcggcctgcgacaggctgccgctgactgagtga

SEQ ID NO: 462 - DNA, 954 bp, Kosakonia cowanii
  source 1..954: mol_type = genomic DNA
atgcagatgtttattgcagggaccagctttgacgccatcaactctatggcggcaagctatgttctggatgtcatcaccattaccggcacagggagtaagacctactccctttccggtgtgtcgctgacatacgccattgtgaatgattttatgggagggcagttaacgggcgcgacctacagcgtcagtgtcagcggattaaccgtgtcgtggaacgtcaataatgccgtcacccttgttgtgtacggcagcccggtagcgggcacgcagagtgactacttcggcttccagctgttccagtacataaacggggtgaggacggtcaagctggccccgaattatgtgccgctgtgcctgcgccagattatagatgtgccggccggtgcgcgaaccgtgcagacgcaggttccggcgggtaacccggtaatgtgttttcaccgtcataccggtgaggcgatggatttgtgctggtggaagcccgtcacggccagcgggtatcacgcactgcagttccccactgcgggcagtaaccagaccgggtgccgggtgtatgttttttcgaatattctcgcgaatatcccgaactatggcttctttctctaccgggacggacaaatggtctggcacagcaactgcctcccgctgcaggtcattcccctgactaacggggatatcaccagcgccacgccgctggcggtaacatccagtgtcacgtcacatatctttgtgcctcaggacccggcatatccgacgggatacagcaatttcatgtgtgcttcagcgggaaaagacggggcgacgtataaagtgcaggtcgggaaagtattccagagcacctatatcagcaaccccgatgagggaaggagaatgagagggtgggcatgcggcggtgtcgggtatatcgacacccggttctatgaccagtactacaaaaatgcgctgggcatcacctga

SEQ ID NO: 463 - DNA, 360 bp, Kosakonia cowanii
  source 1..360: mol_type = genomic DNA
atgaaacatatgccggacaaagacgctggtttctgggcaggtcttattgcctggctatacagccacaaaacagaatggggatatgcgggcgtggcgggcatgttttctctgctgcgcagcgcctatgcgcagtcctcatggagtaagcgtgttcttgacgccgtatcgtgtagcgcactggcatttttcgccgcgccgacgcttcaggtggtcggtggagttcttaactggaacgtaccagatacagccgctcaggttttcgcggtgtacatcgggtatgtcggcaatgactacataagcgagaagctgcgagggtggattagccgcagaacgggagataatagtgaaaatcagtcctga

SEQ ID NO: 464 - DNA, 1008 bp, Kosakonia cowanii
  source 1..1008: mol_type = genomic DNA
atggcaaaaccggactggggcgagcttcagcagcggttcctgtccgatcatgccgcaactggcgtatcaccgaaggattggtgtgaagcgcagggactgaactacgctacagcacgtcgacacatcaaaaaaccaactgcgcaaattgcgcaaaaaactgcgcagaaaaaagtgcgcaatgcgcagaaggaaatagacgttaatgcactggtggaaaacgacggattgacagcgcagcagcgaatctttgtggctgaatacctgaaagaccgcaacgccacccaggccgccatacgtgccgggtacagtgcaaagactgctgagcaaattggttatcagcttcttcagaaaacttcagttgccgctgctattgagaaacagcagaaggcctccttggtgcgaacgcttgccagtgctgatgaggtgctggcacagatgtggcagctcgccacgtttgatgctaacgaactatcgcaatatcgccgtggatcctgccgctactgccatggcttcggccataactaccagtggcgtgacatggtggagtttgaagagcatcgcctaaaagcgattgagaaaaagggtaaagagccggtagacatcggcggttatggctatgaccacaaccgtgaacctaacccggcatgtccgcgctgcaatggtgacggcattggccagccgtatttcgctgatacccgtaagctgccgccagtttcccgtctggcctattccggcatcaagctcggtaagaacggtgttgagatcaccgccattagccgtgaacggatgtatgaagccgtgatgaagcggcttggcttggcggacagcgagtttgcgcagcagctgcagcagatcgaaatcgaacgccgccagctggaagtggaaagactccgcaaagagctggcagcagatccggaagatgaggtaccgatacccgtggcaattaacattaacgtcgcggatgctcgcgtaaggaaagacgatgacggggatatcgccgacccttaa

SEQ ID NO: 465 - DNA, 453 bp, Kosakonia cowanii
  source 1..453: mol_type = genomic DNA
atgaacccgatcaacttcataaagaactattcacacattatcgttatcggccttatttgcattgcgctgtggggactgaatgcccgtaacgcccagttaactgcgactaatgagcggctggagaagctggcgaacagcaaagatgaccagattaacgatctgcgttcaaaaaatgacggcctggccgccagcgtgggcgaactggtaaccgccgtcaggcagcagaaccaagtgatgtcccaggtcactgaacagcgcgctgtaaccgcacagcaaaaccggaagctacagaatgaaattaagcaataccttgaagcggataagtgtgcacagtctcgtgtgcctgataatgctgctgaccggctgcgcgccgcagcaaaagccgcgggtggagtaccggacaataagccagccgcaaatcagcctgccggcagagctgacctcccgcattga

SEQ ID NO: 466 - DNA, 1077 bp, Kosakonia cowanii
  source 1..1077: mol_type = genomic DNA
atgcagaacacaaacgtagcagtagccgaccagaacgctgtcattaactcaaacatcgcgctgttcgattcacagtaccttaatgccatcagcactttcgcccagattatggcgcagggtgcggcgacagtaccgaaacaccttcagggcaaccaggccgactgtatggccgttgcaatgcaggcggcgcagtggcaaatgaaccctttcgccgtggcgcagaaaacccatctgattaacggcgtgctgggatatgaggcccagttggtaaacgcagtgatttcacgcagcggcgtgctggcgaatcgctttgagtatgagtggtacggcccatgggaaaaagtggtcggaaaatttcatatccgcaaaggtgaaaaaggcgaataccgcgttcctggctggaccatggcggaagaagcaggtatcggcattatcatccgcgcaacgctcaaaggcgaagatcacccccgtgagctggatctgctgctggctcaggcccgcacccgtaattcgacactgtgggctgacgatccccgccagcaactcgcctatctggcagtaaaacgctgggcgcgtctgttctgtccggatgtgatcctgggcgtttatacacctgatgagcttgaagatcgtcaggaaaaagaaatcaacctagcaccgcagcagcgcgtaagcgttgctgatatcccggctgaatcgacaactaacagcgcgcaagagtccggtaccaatattgatggcatggccgacgagttccgcgatcgcattgaagtagctcaatccgtggaccaggccaaagccgtgcgggttgatattgaagcagccaaaactactctcggttcggcgctgttcactgagctgaaaaacaaagccgtacggcgctactacctggtagacgcccgcaacaaggtggaagcggcgatcaactccctgccccagcctgacgaaccggatgctgcagagcagttcaccaaagcagagcaggcactggctgctgcgaagcgccatctgggtgacgagctgtatgaccagtttgccgttaccctgctcgatatgaagcccgaatacgtggcatga

SEQ ID NO: 467 - DNA, 612 bp, Kosakonia cowanii
  source 1..612: mol_type = genomic DNA
atggctaataaacaccgtcgtaaatgcgcaaatctgagctgccgccagtggttcaacccggtccgcgaagggcaggtagtttgcagcttcgagtgcgccagcgccatcggcaaagaacagacagcaaaagcccgtgatgccgctaagcagaaggaactacagcggcagcgcgctgaagagaaggctggccgtcagcggcgcgctgcgcgtcgtaaggagctgaagccgatccgtcactgggtgcagatgactcagcgtgcattcaatgactggcgtcgcgaaatgctgctggccgccgggcacggatgcatctcttgcggtaccaaaaccgcttttgcctggcatgccgggcattaccgcaccacagccgccgcaccgcaacttcggtttaatccggacaatatatggctccagtgctctgcctgcaacgtccacaaatcaggcaacatcgaggcataccgcgccgctcttgtcgagctgatcggcgaagaacgcgtgctggcgctcgagtccaacaatgaaacccaccgatacacccgggaagaactggacggcatccgcgcgaaggccagggcagatcttcgagtactgaaacagcaggaggccgcatga

SEQ ID NO: 468 - DNA, 3390 bp, Kosakonia cowanii
  source 1..3390: mol_type = genomic DNA
atggaatttttctacttaattagggcaacgcagaagtcggggaaacctgacggcgttatctggttcagtgccaaaaccgaagcacgagccgccctgacgctcgatgttaatctggaagatacacgtatcgaaactggccgaggcaaagactacgccaaaccgatccgcaccgattttccggttgttaacgacctccctgaagagggcgtcgtcgacttcacctggtgcgatcgctatcaacttgctgacgaccagcgtacctggaacgtgatccccggtgccgcgccacaggatgaaaccgaccttgccccgtccagcaccatcaacgatgtagctctccctgccgcgccggttacggataccgttgatgcgggcaacacctcccagcttgaaaaccgcaccccctctgtccgcttagccgtccatctgctgggcgacaagtatcattcggagatcagccaagaacagcagatcgtcgccaacgagttggctatggatgaggcaaatgtgtatttccagaacctgctgcaggccaaaaatgaagttcctgatatgagcgaactcagccttcacgctgagtggaaactggtgcaggctatcaaagacgttttcccgcagcataaagaacacgaacccgcgctgctggctgctttcatgtcgagctgggttaaagcagaagtgagcgaccgcgcccagcttattgaagactggctcggcggcaaactgccagtccttgaactcatcaccaccagcgatcttggtgatgatgcgcctatttccaatgcagaagatcagcaggatgctacgcccgaagagattgcccaggcccacgtacaggcatttcgcgatagggacattactgaactgcacgctgttcctacgctgtcgttccgtcaccgtctcctcgcgcagtttattaccgagaaggaatacgcgtaccacattgacaatgaacaactgaatactgtgcgccagctggaaatggacaccgataactcctacgtgcaaaacctgctgctggccgccgagaatgtcgaggggatgaaaaatcttcgtgacttcgagttctggaggcttaccgatgctgttaagcgcgtatttccttctgacaaagcgacgcctgatttatccctgatgctccagttcatgaaggcctggaaaacaacggactatatcgatcgcggcctgctcgctaaggaatggattaacggtaaccgggtttcaaccattcagcgcaccgacaccggcacgaacgcgggcggcggcatcaaaacagaccgtaatgcagactatgagcatacgttggacacactggacattgagatcgcctgcgcaactctgccgatggattttgatatctacaatatccccggctctattcaccgccgggctaaagacatcgttgctgcaaaagaaagtccctggaaggagtggtccgcagcactgcgtaaaactgcaggtatcctggattactcgcgcgctgcaatttttgcgctcatccgcgaagcgtcctcaggcataactacgttcccggatcgcatgactggttatatcagcgcgaccctcaatgaatacaagcatgatacacctgaggccagaatcctcgccgctgcgcgtcagattgatagcgcggccgtggatgccggagtcattcattgcaccgagccgtcacaccagctcgtcgccacccatcagccagaagtatccaacctcggcggcggcatattttccatcgatggtctgctggatgaaaaagcaaacccggtcatcaataccccctcaaacgaagtcgaaaaacaggaagtggagatcgttggcagtgtgcagatggaagagactgacccgagcaaagtcgaagctggtaatgcgttaccagcagtcgaagtcgctaatgaagctgctgcgcaaacaattagcgtaagcccggcggatatcctcgccgctgccacaccagaaatgacgcgcaacgttgcccccgttctggaccagaatattgatgctcttagccaggatgagccggaattacctccaaccgaaccagaaatgacagaaatagaaccggtagcggatatttccgagccagaagctgctgctaaggaatggccagcttacttcgagccaggccgttatgaaggtctgccgaacgacgtttaccatgccgcgaacggcatcagcagcacccaggtgaaggatgcccgtgtctccctgatgtatttcgaagcgcgccacgtctctaagaccatccagaaggagcggtcaaaggttctcgacatgggcaatctggtgcatgcgcttgcgttgcagccggagacgcttgccgccgagttcagcattgagccggagatcccggaaggtgcactcaccaccacggcgacgatccgcgagtgcattgacgagtacaacgccagcctgccgtcgcagctgagcgctgatgatatcaaagcgctgctggaggcccataacgccaccctgcccacgccgctgccgctgggtgcagcagtagacgaaaccgcagaaagctatatggcgctgccggaagagttccagcgcatcgaggctgataagaagcagaccgctgcagctatgaaagcctgtatcaaagaatacaacgccaccctgcccgctccggtgaaaaccagcggcagccgtgacgcactcctcgagcagttggcaatcattaatcccgacctggtagcgcaggaagcgcagaagccacagcccctgaaagtttcgggtacgaaagccgacctgattcaggccgtcaaggcagtcaaaccagatgctgtgtttgccgacgagctgctggatgcctggcgcgagaacccggaaggcaaggtgctgatgacccgccagcagttggaaaccgcgctggctatccagaaagcgctgcattcgcacccgaccgccggaaagctgctgcagcatcctgatcgcgccgttgagacaagctatttcggcatcgacgaagagaccggcctcgaaatccgtgtgcgccctgaccttgagctggacgtagatggcgtgcgcatcggtgccgacctcaaaacgatttctatgtggaacatcaagcagtcaggtctgcgggcgaagctgcaccgtgaaatcatcgatcgcgattaccacctgagcgccggtatgtacatggagacggcaagcctcgaccaattcttctggatcttcgtcaacaaggacgagggatatcactggattgccattgttgaggcttcgcaggagctggtggagctgggcatcctagagtaccgcgccacgatgcgcgccattgccaacgcattcgataccggcgagtggccagcgccgatcaccaccgactacaccgacgaactcaccgagtacgatctgcgccgccttgaagcgctgcgcgcggcttaa

SEQ ID NO: 469 - DNA, 270 bp, Kosakonia cowanii
  source 1..270: mol_type = genomic DNA
atggcaaagcttcttaatttgcaggaatgggccgctggagtgtactcatcaccgccatcgctttctactcttcgcagatgggtacgtgaaggcaagatctatcctgcccccgagctacacggtaaagagtataagctccgcccggatgctatctatgttgatccgagcaagaagaatttgcgcttaaaaccgcagcatctaaaaattccgtccaaagggactttactggagagattacagaatgcagaggccagcccgttacgacgctaa

SEQ ID NO: 470 - DNA, 165 bp, Kosakonia cowanii
  source 1..165: mol_type = genomic DNA
atgagcacgcagtggcgcacgggcatgggcggcatcaccgggctggattacaacgtgctgccctggctgatgaagctgaacggggtggaggatgaggcaaccgcgttaatggatatccgcgtaatggaaagcgcggcgctgaagattgtgcatcagggggcgtaa

SEQ ID NO: 471 - DNA, 678 bp, Kosakonia cowanii
  source 1..678: mol_type = genomic DNA
atgggcttcgcattacctaatggcgccacggtatttgtcggctcgaaactcgccacgcccgtggcggtgacgggcgtcagcaatgccgcaggcgctgtctttaccgttgcaaacgaccacggcctcgctgttggcgatgtggtgctggtttccagtggctgggctctgattgatagcctggtggcgcgcgtcacggcgcagacgaccaccagcgtgacgatcggggtgattaacagcaccgataccaactttttcccggctggctccggcaccggttccttaagcaaagtagtcgagtggactgagatcccgcagatcaccgaagtttcacagtccggcggtgaccagcagtacacgcagatccagttccttgccgatgaccgccagcgcaacctggcgacctacaaggcagccaagtcgcagacctttacggttgcgcatgactccacgctgcctatctatgccgtgctgtcagctgctgaccgttctggtgacacgctaccgctgcgcatgtacgtgccaaaggcgaaggaaacgcgttactggtcgggtaagccgtctttcgatccgcagccaaccactgcgccgaacgccgtcgagacggtacagccagcgtttgccatccagtcccgcgatatcaccttttataaagatgctgccccgcaggcagccgcttaa

SEQ ID NO: 472 - DNA, 609 bp, Kosakonia cowanii
  source 1..609: mol_type = genomic DNA
atggcagataaccaggcgtttatggtgtccattaatgcgttcgtcagccaggcaaaggagcgacaggaggaagtggtgcgggtggttggcatcaaaatcctggcgcggctggtgcagatgtcgcctgtcggcaatccagagctttgggcggtgaaccagacggcggcggcctataacgcggcggttgcagagcataacagtctgctgcggcaaaacccggacaacctgactaaagcaggccggctgcggccaggccgcaaagttaaggacggcatggacctgaaagcgccgccgggctatacgggcgggcgttttcgcggtaactggcaggtctcctttgatgcgcgcactaccgacgaaacggggcgggttgataaagctggccatctgacgatggctgccggaaatgtcactcttggcctgtttaaagtcggtgtgcgcgatatctacttctgcaataacgtcccgtactcataccgtctggagatggggcattccagccaggcgcctggcggcatggtgcgcatcaccgcggcagaattccagcggtatttcagccaggcagtcagcgaggttaaaaatgataccggacatcacaacggcgcttga

SEQ ID NO: 473 - DNA, 483 bp, Kosakonia cowanii
  source 1..483: mol_type = genomic DNA
atgatcattaccgatatcacttcaccggccatgaacagctatgcaggcgagggggatttgaaagcttttgccgatctgcgcgatatcacgctgccggaaaagatcgcgccattgctcatccgggcgatggattaccttgaggggctggactgggccggccggcgaagcgaaccaaagcagccgctggcgtggccgcgcgcgggcatcgaactggacggatacgaactgcccgccggagaggtaccgcgtcaggttgttactgcgcaatgcatgctggcggtcgaggcgatggatggcgatctgctgggcagtgtgcgagaagcagctgtgaagtccgagcgcgtggagggagccgtaaccacgacgtatgccgtcgctgacggcgaagtgttcagaccgtcttacccggcggtgatggctttgctcggcgagctggctggtggtcgtggctatgcagtaaacgcttctgcggagcgtgcgtaa

SEQ ID NO: 474 - DNA, 312 bp, Kosakonia cowanii
  source 1..312: mol_type = genomic DNA
atggccactaaatttcagctccagcccaaaccgactttcaaagcagacgtcaccattccgcgcgccggcgaagatgatggcttacttacgtttaccttccgtcataaaccagtcagcgaacttgctgcactcgaagaaatcgagggaaaaactgctatcgacttcctgactgaaatcaccgagtcctgggcactaccggatgagttcagtcgtgaaaatctggagatgctcctggataactaccctggcgcgatgaaagcgatcgtcggcacctactatcgggagcttacaggtaaccgtgaaaaaaactga

SEQ ID NO: 475 - DNA, 411 bp, Kosakonia cowanii
  source 1..411: mol_type = genomic DNA
atgataccggacatcacaacggcgcttgagtccatgctgggtctgtgggcagatggcgagggcgtgcgggtggcatgggataacattcaattcgacccgcctggcgacgggctgtatctgatctcccatgatatgcctgcgcagccgtacagcattgatatggccgggggctgccgggtctaccccggcgtgtatcaggtcaccgtcgtcgcgccagcgggtggcggcaaatcacaggccagagcgctggcccaccgcgtcgccgggttgttcccggagaaccaggagatcccaggtgacggctttaccgcttgggtgacatcacagcccgccatttaccccggcatagcggacggcgtgtcctactccatccccgtcagcatcaactaccgggctgatatctcagcttga

SEQ ID NO: 476 - DNA, 351 bp, Kosakonia cowanii
  source 1..351: mol_type = genomic DNA
atgcctgtgaactacacccgcatgaaagccaccagcacgcgcctgctcactgagaacggcgcggcgtacccggtaaagcgtaagggcacagtaacagtcatcggaggcgttgaacatcgtgagccggataagaccttcactgcgatcggcgtgcggactgagtatagacccggcgaaattgacggtacggtcatcataaacggcgacatgcgtattatgtttactgctgataacgagctgcgcaccggtgacatggtggacgtggacggcaaatggtaccgcattgagaagcccaacccggtcaatcctggcaagctgctcttgtgctaccgcgctcagctgagggcataa

SEQ ID NO: 477 - DNA, 1407 bp, Kosakonia cowanii
  source 1..1407: mol_type = genomic DNA
atggctaataacgacatcacctgggttcgtcctgagcaccgggcagccagtgctgcctggaagaaaatcagggacttttgcaaaggggcggaggcggtaaaagaaccgggcaacaactatctgcctttgcttgactccacagacaagagcatgcgcaaccgcaagcgcaacgaagactacctgcagcgggcggtcttctatgcgattactggtaataccaagattggcctcctcgggctggcctttcgaaaggatccgaccttttccgcgccggagaaactgagctatctgctgaagaacgccgacggcgctggcaccagcatttaccagcagtcgcagctggtgaccgagaacgtgctggaggtggcacgtgacgggctttatgtcgattacgctgagggtagtgggcaggccattatcctgcgctatctggccgagaacatcatcaactggcgcacgaagcgcatcaacgggcgcgatcagttggtgctggtggtgttgaaggaatgtgtggagcaggaggatggctacgcgttcaaggatgaggtccagtatcgcgagcttgcgcttgaagagggccggttcatctgccgggtgtggcgccgcagcgcggatgccggttccgctgtatacgctgttaccagtgaataccagccgaagcccaaaggcaaagacagctgggacgaaatcccgtttaccttcgtcggcgcgcagaacaacgatccgactatcgacgactcaccactcgccgcgctggtggagataaaccatggtcacttccggaacagtgctgattacgaagacagtgtgtggttctgcggccaggtccagccctacatgacgggacttgatgaaggatggcgcgatcatctggaaaagaagggggttaaaatcggctcccgctcgccgctgctgctgcccagagagggcaactttggttatgcccaggcgcaacccaacatgctggcgaaagaggctatggacagtaagcgcgactacatggtgcagctgggtgcccggctcatcgagcagaacgcggcggtgaaaactgcaacgcagtccagcagtgagcagacatcgtccacttctgtactggggatctgcgtctcgaacgtatcggaggcctattcactggccatcggctggtgcgcgaaatatctgggcgtcggcgagcagcaggcggcctacgcgatcaaccaggagttcattgctaaggtcgccgagtccggcatggttaccgccattgtgaacgcttggcagtccggtgcaatccgcgacactgatatggttcgtgcgctgcagaagcttgacctcatcaacccagcagacagccccgacgatattattgacgagctgcacaaccccaaccccaccctgattggcggtaacaatggcaacggtaaatga

SEQ ID NO: 478 - DNA, 1311 bp, Kosakonia cowanii
  source 1..1311: mol_type = genomic DNA
atgacggggatatcgccgacccttaacgtaccgcaggcgcagtttctggcgatgccgcataaattcaaggcctatgtggcaggcttcggctccggtaaaacatgggtgggctgtggcggcatctgcaaggggatgtgggaacatcccaaaatcaaccagggctacttcgctccgacctatccgcaaatccgggacatcttctatccgacagtggaggaggtggcgttcgactggggccttaaggtccagatcaacgagagcaacaaagaggtccatttctacgccgggaggcagtaccgaggcaccactatctgccgctcaatggagaaaccggccacgattgtcggctttaaaatcggcaacgcgctggtggatgagctcgacgtgatgcccgccctcaaagcgcagcaggcctggcggaaaatcatcgcccgtatgcgctataaggtcgctggactgcgtaacggcattgacgttaccaccacaccagaagggtataagttcgtttatcagcagttcgttaaggcagtgcgcgataagcctgagctggcaaccctgtacggacttgtgcaggcttccacatttgataatgaagcgaacctgcctgatgactatattccctcgctgctggcgagctatccaccagagctgataaaagcctacctgcgcggtcatttcactaacctgacaagcggcaccatttaccaccagtttgatcgcaggctgaacaactgcacagatgaagagcagccgggcgagccgctgtttatcggcatggacttcaacgtcggtaagatggcagccatcgttcatgtgaagcgtgaagggttgccgcgcgcggtgcgggagttggtgaaggtctatgacactccggcgatgatcaaacgcattcaggaagagttctggcgctatgagggcggccgctacgttgccagccgccagatctacatatatccggatgcctccggcgacagccgcaaatccaactgcgccagcctgaccgatattgcccagcttagagaagcggggttcagcgtcatggttaacgcttccaacccgccggtgaaagatcgtatcaactcgatgaacgccatgttctgtaatgcgctgggcgaacggcgttacctggttaatgtccagcgctgcccggtctatacggaaagtcttgagcagcaggtatgggataaaaacggcgagccggacaaaaaggcagataacgatcaccccaacgatggtggcgggtatttcattgttaaggattaccccatcgtcaaacctgcatactcaatcactatggataccaccttctga

SEQ ID NO: 479 - DNA, 954 bp, Kosakonia cowanii
  source 1..954: mol_type = genomic DNA
atggctacaactgttaataacgatctggtcatctatgacgatctggcgcagaccgctttcctcgagcgccgccaggacaatctggaagtgttcaacacttcctccaacggcgcgatcctgctggacaatgagctcatagaaggcgacttccgcaagcgcgccttctacaaagtaggtggttccatcgaatcgcgtgatgtgaactccaccggcaaggtgaatggtaaaaaaatcggtgccggtgaggcggtgtctgttaaggcaccgtggaaatacggtccgtacgaaaccactgaggaagcctttaaacgccgtggccgcacggttgacgagttctccgaagtgattggcgttgatgtggctgacgctaccctggaaggctacgtgaaatatggcctgaaggcgctgacggcggcaatcggagcaaacaccgatatggtggtgaccgccgatatcgaaaccgacgggaagaaaaccctgacgcgcggcctgcgcaaatacggtgacaaattcaaccgcgtagtgctgttcgttatgcactccgccacctacttcgacattgtggacgaggcgatcgccagcaagatatacgaagaagctggcgtggtggtgtacggcggccagccgggtaccttgggtaagcccgtgctggtgaccgataccatggatgccgccgctattctggggctggtggccggtgcggtgaccgtgaccgaatcgcaggcgccgggcttccgctcctacgacatcaacgaccaggaaaacctcgcggttggctaccgtgcagagggtactgtcaacgttgaactgctgggctacagctgggatacggctaaaggtgagaacccggatctgaccgccatcggcatggccggtaactggaagaagcattttaccagcaacaagtccactgcaggcgtgctgatcaagctgggggccgcatcgggggagtaa

SEQ ID NO: 480 - DNA, 597 bp, Kosakonia cowanii
  source 1..597: mol_type = genomic DNA
atggcgcagttacaactcatcaagcattctttcaatatcctgatccccgctacgccggagaccagcgatttcctgcaatcaaaatgtaagctcggcaccgtgctggtggctgatttcaaacaggtccgcaacccggcctttcaccgtggtttctttgctctgctgaatctcggcttcgaatactgggagcctactggcggagcgatttcctcaaatgaacgcaggttggttaccggctatgccaaatacctggcatcgttcggcggaagcgaaaccgcgctgctggatgctgctgagcagtacctcgatcgtatcgccgataagcgcacgggcagcatcagcgcttgcaaatccttcgacgcctatcgtgcctgggtgactatcgagtccgggcactatgacgccatccaactgcctgacggaaccctccgaaaacatccccgcagcatcgccttcgccaacatggacgaaaccgagtttcagcagctctacaaagctgcgctcgatgttctgtggcgctggatcctgtccaggacattcagagaccagcgcgaggctgagaacgctgccgcgcagctactgagctttgggggctga

SEQ ID NO: 481 - DNA, 1119 bp, Kosakonia cowanii
  source 1..1119: mol_type = genomic DNA
atggcaacggtaaatgaaacgttacgtgacgaagccatagcccacaccgtctggatcagtcgttacagcactggtgtggcaaaccgcatggttaagctgctgaacgacagcgacgctgagcttgtcgcacggctgctgttggcgatggacagcctgcccaccagccagtttacggtcagccgactggaaagcatgctggggagcgtacgcgagcttaaccagcaggcaataacgggcatgcataccagcctggcggatgagctcctgcagctggccgggcatgaagcaggctatcaactgagcctgtttgattccctgctgccgcagcgggtgaaagagcggtacccgctgcagagcatcacgcctgagcagctttacgcggccgccatggcacagccctttcagggacgtctgttgagcgaatgggccgataaccttgaagccgaccgcatggcacgcgttgtcaatgcagtgcgtcgcggctacctgcagggtgacaccacggagaccattgcccggcaggttcgcgggatcgccagcaaaggctataaggacggggcgctgcagctcagccgtaccaatgccgccagcattaccaaaacggctgtgaatcacctggcagccacggcgcggactaattttgcagaagccaacggcgatgtactgaaaggtaaacagtggctctccaccctggacaacaaaaccacgccaacgtgcatcatccgtgatcgcctccgttacacccttgacaacaaacctttcggtcacaaggttccgtatctgcaggggccggggaagatccatttctgctgtcgttccacggagacgctgattaccaaatcatggcgtgaactcgggatcgacagtaacgagctggatgaagatactcgcgccagcatggacgggcaggtgccagcggataccacatatcttgactggctggcgcggcagtccccgcagcgccaggatcatatactgggaccggagcggggacgaatgtatcgaggtggaaatttggagctagaaaacatgttttctgataagggcgagtggatcacactgagtcagttgcatgaaagaagtaataaagcctatcaacaaactaaggatgttttgtaa

SEQ ID NO: 482 - DNA, 201 bp, Kosakonia cowanii
  source 1..201: mol_type = genomic DNA
atgaaagagacctggttctatcacatggaatgcaccacggagcaggcagaagagctgctggcgcaataccgccgccgcggcgttaaggtcgagcgcagcctcaaccctgatctcatcacctggaccgtcagcgcccagctgccggagggaaatcatccgccgcgccctagccgggtatggcaaagcaagacgtggggttga

SEQ ID NO: 483 - DNA, 201 bp, Kosakonia cowanii
  source 1..201: mol_type = genomic DNA
atgacattcttcattgtctgggaagcatacacacgcgactggcaactgatgcaaaagggctcacgctttatgagcactgacgatcctgacatcattgatgttgatctcgccgactatgtggcggacatgtcaaaagtgttagatattgaggagagatttttcgtcatcacctcggtgcagcaacttggagttctaaagtag

SEQ ID NO: 484 - DNA, 243 bp, Kosakonia cowanii
  source 1..243: mol_type = genomic DNA
atgtccttaagcacgctgattaaaaccataacaatttccaatgctgttgtaggggattttaaattcgagatttaccagaatgaaaaggctcttttccatgcggatatatctcgtaaaaattcactcggtaaatgggaacagttccgcaataagtttaaatttagcaaagccttagacgttgaggaagttattgggcgttgtagaaaacttgttgatgatcaattgcttgctatgaaagagtaa

SEQ ID NO: 485 - DNA, 3375 bp, Kosakonia cowanii
  source 1..3375: mol_type = genomic DNA
atgtctgatattgcaacaatttcgcttcgggtgaataccgccgagctggagcgcggtaacaaggcgctggacgatttccagcagacagccggcggcgcggcaaacaaggccgatgatctgaactcggtgtttcgcgcgggtgcatccgatcagaaaaagaatacccagagcctgaaagagcagcagcaggaactgcaaaacctgctgaataaaatcagcccggtgaacagggcgttggacgagctggacaacctgcaggaaagtctgagtaaattccgtaagagcggactggtgcctgatgcagattattcccgctataacagcgtgctggaaaccacccgggaaaagctcggcagggtcatggaggccgagactgctgaagggcaggaacggttaaagcaggcgcaggagacgcagcgcgccacagccgcgcaggagaacttcctcagatccatcactgaccaggcggcgacattccgcgccagcaaagcggacatggctgagtaccgggcggcgcaaatggggatcgccgaggaggctgccccagttattgcacggctgcgcgagcaggagcgtgccgtccagcaggaggctgcccagcgccagatcgccgccagccagtcccgtatgctcaagcaggttattgcagagcttgaggcggcagagcgggccgaagccgccgaggcgcaacgggcacaggctgtccgcgattcattcatccgttcactggcagaccaggccgtagcgattggcaaaacacgggcagaactgctggagatgaaggccgctcagctgggtgtgtcgcagcaggcagcaccgttcattgcgaaactgcgtgagcaggagacggcatgggagaggggcattatcagcgctgggcaatatcagcaggctatgcgccagctgcctgcacaaatcactgacgtttttacttcgctcgcgtcaggtatgccaatctggctggtggctatccagcagggcgggcagatcaaagactcgttcggcggcatcggcaatatgcttaaagccctgggcggtctgattactcctgttaatgtgggcctggcgcttctggccggtaccgcaacgctgcttaccgtagcctactttaagggatcggcagagaacgctgagttcaacaagcagttaatcctgacagggaactatgccgggcagaccgcagggcagctatccgcgctggcaaaatctctctccggcaatggtgtcacgcagtacgccagcgccagcattctggccgaggtggttggatccggtaaatttaacgcagataaatttgaatcagttgcgcgcgcggcaatagccatgcagcaggctaccggccaggccgtatctgagacgatcgccaactttaaaaagttatatgacgatccgacgaaagcatcggccgagctgaacagccagatgcattacctgaccgccacgcagttcgagtacatttctgcgcttgaacgacgaggggataaggaagcagcaggccagacggcagcggatgcctacagcaaagccgagcagcagcgcagccagcagatcctggataacctcgggctggtggaaagggcggcgaatgctacccgaaatgctcttaagggtatgtgggatgagctgctaaatattggccgcccgcaggcaccccaggacatgcttaagcagatggaaagccagctcgctgcgctggaaaaaaatctgcttcctgagcgccagcgcatggggtatggctacagctatgacaccagttcgcaggatcaggaatacgataatcgccgtaaggcccagcttgccgcgattgcgtcgctgaaagcccaggttagtccgatgcagcaggcgatcactctccaggaaaacctcaatggcgccataacgtcaggcaataaggtgaatgaagatgcgatcgatgcacagcaggttatcaatcgttaccttgatgccggaaccacggcagcggataagcggcgaaaggctcaggaagagttaaataaggcgattgccgacaatgctaaggccgccagagacgggacggcaaaactgtggacgccggaagaggttgcaaaggcgcgtgctggcattgagaagctgtatcaggatcccaaaacgcctaaagcaaaaggagtaacagttactgccggcgatcgtgccgaagattctgcgcaggctgaacttttagctcttcaggcacaactcaggacacttcaagatcatcgttcaatcaacgatattatcagccagcaacgcaaggacctctacgctactgagtcgaagtttgccgttcttgaagaggcgtcacgtacaaggaggctgtctaagcaggagcggtctctgctggcaagtaaagatcaggtgcttcagctggcgcgtcagaaagctcttctcggtgaccagattaccgctcaggagcaactgaataagcggatggatacggcgcagaagtacgttactcaaatggtggagaagcaagccgggcttgcatctggagccacaatgagtgacagacttgccgggcgacaggcatctctgtctcagctgcgcagtggctggctcaatgcgggcgggggtctcaacgatgacggttataagcgggagttaaaggccgctaacgattactacgcagcagaagacaaactacgtggagaatggatggcaggtgccagaaaaggctgggccgagtaccttgatgcggcaaccaacgtttatggctcaatgcaaagcgtagcgcagtcagccctgggcggtatatcagatatgctgacaaacctggtcactaccggaacggccagtttcaaaagtttcgccgcctccatgatgaagatgatcgctgatgtcattaaccgactgctggtggcgtacaccgtacaggctgcaatgggatggatttctgcgggtacctcatcagtaggtagtggtgcaggccagtcttttgctgtcccgtctttccggccagcgtggaacgggggatatatccctgaatttgacaccggcggttacacaggcgatggcggcaaatatcagcccaaaggggtggtacacggcggtgagttcgtttttaccaaggaggccacagctgcaatcggtgtcaataatctttatgcgatgatgcgtggtgctcagggatatgctgaaggcggggttgtcggcagggcgcccatgctggggctcatttccggttctggtaatgctgcaccggtaattaacaccactgtaaacgtcgatgccagtggtaacgcttcggctcaatccagcagctctggagacgctatggggcgcgccatggcggctgaaatacaaaacgctgcaacactggtggttcagaagcacctgaagccagggggcatgatctacaactttacgaagggtcgttag

SEQ ID NO: 486 - DNA, 693 bp, Kosakonia cowanii
  source 1..693: mol_type = genomic DNA
atgaaaaaaatcgcagagagcattcgcaattttgactgggagcaggctcgccgcgtggcgcacaacatgccagagcagtataccgagcgcgaacaaacgcagcaggtggcgcagattatcaacggtctattcgtacagctggcagcagcgttcccggcaagcctggttaatcgcagccaggaagatgttaacgagatccgccgacagtgggtgctggcctttaaagaaaacgggatcacaaccatggagcaggtcgaagccggcatgcgcatggtacgccgacaggtgcgtccatttctgccttcgccaggccagttcatcaagtggtgcagggaagggcgctgcgtgctggggatcaccactgctgacgtcatggctgaatactggaagtggcgtaagctggtattccggtacccgagcagtgagcagtatccttggccgaagacgctttactatcacatctgcctcgagttgcgtcgccgcggaaccgatggccagttgtgtcagaaagagctcgagcgcgaggccagcgatattttggatatgtgggaaaaacgggttatagccggaaagccgattccgcctgttcgtcgtgccttggcagctccagtggcttcgaatgagccaacccctgcggagcttctgaaagccaaatatgagcggatgaagtctggtgggagggcagagcgatga

SEQ ID NO: 487 - DNA, 771 bp, Kosakonia cowanii
  source 1..771: mol_type = genomic DNA
atgttaatccgaaatatgctcctgaaatactacgcacctgaaaacgatgaccaaggcggcgggggtggtggtaccgaaatcacaccagaaatccagaagctgattgatgatcaggtcgcagctcaggtgaacggccttaaaaccaaaaactccgagttgctgggcacgataaagcagcagaaagacaacctttcccgctttgaaggtatcgatcctgatgccgtacgcggcatcctgcagcgattttctgacgacgaagaggcaaagctgattgccgccgggaaaattgacgaggttctggataaacgcaccgagcgcctgcgcgctgatgtcgataagcagatcaaagcggccaatgaacgcgcggacaaggccgaagccttctccggcaaattccgggatcgtgtactgggtgacgccatccgggcggcagcgtcaaaagctggcgctctgccggaagcatccgacgatctgatcttacgtgccaaaggcacgttccagctcaacgacgaaggcgaggccgtagcagttgatggaaatggcgatgttctgttcggtaaggacggcaaaacgccgttaagcccgcttgaatgggcggagtcgctcaaggagacggccccgcacctgttcccacgcgctgaaggtaccggcgcgggtggacacaaaccaggcggtggtggtagtcagaaacgttcagagatgagcgccagcgataaggcggactatatccgcaagcatggccagcaggccttcctcaaacttccgaaataa

SEQ ID NO: 488 - DNA, 858 bp, Kosakonia cowanii
  source 1..858: mol_type = genomic DNA
atggccgacctgtcgaacgggtataccaaggtcgctaacgagatccaacagcttaagccgcgcctgagattgtcaggccgggaatggcaatgttttgaggcggtgatctggcttacctacggctggaacaagaagcaggaccgcgttacgaacacggtgattgctgagcttacagggctgagtgattcgcatgtttctgatgcgctcaaatcgctcgctgaacgcaaaataatctttagtcaaaagcagggcgtgatgaaaacagttggtataaatactgacctttccgcctggattttagacaaaccgaaaacgggtaaaaccttcccgaaatcgggaaaagtgttaccgaaaacgggaaaagtcttcccggaaacggtagacacccaagactataacaagaacaatattaaaatatcctcgtctcggaattctgacgaatcccgaaaccagaaaactcaaaagttcctctctcgccatccagaggctgccgccgggatatacaccccagcaggtaaatcatggggatccgctgacgacctcaaggccgcacgctggatttacgacaggcttctcaccgtcaacgcatcgctatctgaacccaactgggctgaatgggcaaacaccatcaggctgatgcgtgtccaggacaagcgtactcactacgaaatctgtgacctgtttcagtgggccaaccgggacgagttctggaaagacaatatccttagcccttcgagtctgcgcaagcagtgggatcagctcacaaccaaacggctgcgcacaaccggagcggcaaaatcttcccggggtggcatcgacctgcataacaccgactggattgacggggtactggaatga

SEQ ID NO: 489 - DNA, 204 bp, Kosakonia cowanii
  source 1..204: mol_type = genomic DNA
atgagccatgtttacgatctggtgcgccgggcagacggcaaaaaggtattcagtttccctgccggcggccgctatctggtggacacgtcaaatggtctgcagtcgatgcgtcccctgatggacgacgagatcatttttacggtggagagtgcagcgcgctttctgaagaaaattggttatcaggtaatcccgccagcggcgtga

SEQ ID NO: 490 - DNA, 228 bp, Kosakonia cowanii
  source 1..228: mol_type = genomic DNA
atgtccgcacttgataaagcaattaaagccgctggctcagccagaaagctcagcatcgcgcttggtgtgactagtatgtctgtaagccattggaagaatcgcgaccacggaatcgtcccgccaagttacattttctcaattttcaaaatgacaggcgtaactccgcacgagctgcgcccagatctctacccaaacccaacagacggtttacctaaacaggagccttaa

SEQ ID NO: 491 - DNA, 387 bp, Kosakonia cowanii
  source 1..387: mol_type = genomic DNA
atgagaaaagaagaacccaaccttgttctggtgaaacgcctcactgagatcaccgatcgcggtgttaccaaagcagatatggcacgaatagctggagtcacccctcaggccgtaaacggctggttcaagaaaggcgtgattagtaagaaatcggcactggctatagctgacgcggcaggcatttctgttgcttggttactcggcgaggacgttggtgagaaagatggactcaagccggacgaacagcgtctattagaactttaccggcaactaccagcggaagagcaacagaacatgctccgtatcttcgcgcttcgcctgaatgaacttgatgaactctatgcgcgatacatgaaggggcgcatcagaagtggagatgcctcctaa

SEQ ID NO: 492 - DNA, 489 bp, Kosakonia cowanii
  source 1..489: mol_type = genomic DNA
atgacacgaattggcattcttggagtaaatgatctgactgaaaccattctggtcgaattgttccgtcttgatccttgcgctcatgtttttctttcatccggggagcatgagcgcgcaaacctgctggcaaggaagtttccgtgctggattcaggatgacgttcaggcggtaattaacgaagcagatatcattatcattacgacaggaacatattcctctgaaaacccaccggaaaaaatcgagtatcgaaaatcacaattaatcttttttttggaagcatggccatcaataaacagtcaggtgttttcaccctatacggataaaaaaataaattttacaaccagacatgtagcactggctaatatttcgccatttattcatctaacagaaatacagattgatgactatctttttattcttaaagtcctgttggttgcaatgaaacccgtgcatacacttgatgtcaatttcagatcgtcatctgaataa

SEQ ID NO: 493 - DNA, 1467 bp, Kosakonia cowanii
  source 1..1467: mol_type = genomic DNA
atgtttcccctaaacacgcttgcagtggtggtgggtgcctgcatcctgacgggttgtgccgtcggaccggactattatcgtcctgaggtacccattgcgaagcattaccacgctcaacaggctttacagcagcccactacatccgaatccgccagtttttcaatctggtgggaaaactttggcgatccgctgttaagtcggttcgtttcagatgcacttacgcaaaatcttgacctcgcccaggcatccgccaggatgatgcaggcacaagccgggctgggagcggcaacggcggcgctgcttccctcgggaaatatcagcgggcaagctgcacgtacgtatcagtcggttgaaacaccgttgggtcaggtgcttagttcaacgccggattataatcgctacggcaattcgtatgaaatggatctcaatgcaggctgggagatagacctgtttggtggcctgagacgaggtcgtcaggctgccctggccgattatcaggcttctcaggccggtgtagcggcgacacgcctcgctgtcgcagcacagacagcagatatctatatcaccctgcgtggattacagtcccgtctggatattgcgaataaacaggtcattacacaacagcaactgctggaaaaagttcagctgttgtacagcaaagggctggcatcagaatatcaggttcgtcagacagaaggcgcactggcacaggtgaaggcaacggtaccggttctgaacaacggacttgatgccgccataaatgcgctggacgtcatgctgggcgcgcctccggggacgcatcatgcgcaactggcttcaccgggggcaattcctcatgcacccgcaatcaccgcaatgggcacccctgctgacctgcttcgccgcaggcccgatattattgtggccgagcgccatctggccgcatcaagcgcccgtatcggtgtggctgtcagcgagtattatccaaagttttcccttaatgctctgcttggcagcgcaacggcagtgtcaggcgataatcttttcactgccggtgccagccagtcggcaggtgtgctggggttacgctggcggctttttgactttggccgtattaacgcccagataaagcaggcaaagggccaggaagctgaggctctcgcggcttatcgtctgtcagtcttgcgcgcagcagaagacgtagaaaacgcattctcggcactggtcaatcgccagacgcaggcagccacactgacgagcggcgaaaccgccctggccagcgcccgacagtcttctttcgtggcttttcagcaaggtacagccagtctgattgacgtactgcataacgatgaaacgcttctccaggcctcggatgcaagagcgcaggcgcagacagaagctgcccatgcagccgtggcagcattcagggcgctgggcggtggctggcaatctacattgtctgaagaaatagtaaatacgccgggataa

SEQ ID NO: 494 - DNA, 615 bp, Kosakonia cowanii
  source 1..615: mol_type = genomic DNA
atgactaaacagataaacgatacccccacgcgggggccttccgaccatagtgtccgtgatcaggttgttgacgcagccactgagcatttcggccactacggctacgaaaaaaccacggtctccgatctcgccaaagcgatcggtttttcaaaggcttatatctataagttttttgattctaaacaggcaatcggagaagttatctgctcaaaccggctggcgatgatcatggaaattgttaatgctgcgattgcggatgcgccgacagctgctgagaaaattcggcgattattcagagcattatcagaatccggcagcgatttgttttttcgtgaccgtaagttgtacgacatcgcggccgttgcggcacgtgataactggccttcagcgcaagcgcatgagcaacgtctgcgtcagcttattgaacagatcattgttgaagggcgtgaggctggtgagtttgaaagaaaaactccccttgacgagactgctgatgcgatttttatggtcatgcgaccttatatcagcccggtgcagctgcaatataatctggaaactgccccggccgcagccgcattactgccctccctgatcctgagaagtttgtccccttga

SEQ ID NO: 495 - DNA, 1110 bp, Kosakonia cowanii
  source 1..1110: mol_type = genomic DNA
atgttcaggcttaaacctgccacttttgctgtttgcctgctgccgtttgcacttgtggcctgcggcgacgcttcagataacagtgatccccgcagcctgccacccctggtcaggtctgccgcagcgatcaacgcaacccattcttcccgcgcttttacaggggtggtggttgcacgtatccagagcgaccttggtttcagggtacaaggcaaaatcctggaacgtctcgttgataccggtcaggccgtgaaacgaggccagccgttaatgcgtctggaccctttggatctaagcctgcaggctcaggctcagcaacaggctgtcgctgcagcaaaagcacgcgcccgacagacagcagacgacgaatcgcgatatcgcggtctggtcactaccggagctgtatcggcctccgcttacgatcagattaaagccgcggcagatacggccagggctgatctcagtgccgcccaggcgcaggcgaatgtggcgcaaaacgccatgagctacgcagtcctggtggccgatgatgacggggtagtcatggatacgctggccgaacccggtcaggtggtcagtgccggacaaccggttatcagacttgccagagccggtcagcgcgaagcggttgtccagttgcctgagacgctacgtccgtccccaggaagcacggcacaggcttctctgtacggcagcgataaacagcccgtttccgcgacactgcggttactctcggatgccgccgatccgttgacgcgcacgttcgaggcacggtatgtgctgaacggccctttgtctggtgccccactggggtccactgtcaccattcatattgcgcagggcagaacatcgcagccgttgctgcaggtgcctttagccgccgtttttgatgcgggtaaaggcccgggtgtctggagcatttctggaaaccccgccagagtggcatggcgtccagtacaggtcgtcagcctcggggatgatgcggcaagcgtgaccggcagccttaagcctggcgaacaggtcgtggcgctgggggctcatctgctgcatgacggtgagacagtccggctggcgaagcagagcgatgtcagtgtcgccgggagccagccatga

SEQ ID NO: 496 - DNA, 3111 bp, Kosakonia cowanii
  source 1..3111: mol_type = genomic DNA
atgagtagtggacgtttcaatctttccgcgctcgctgtgcgtgagcgttcagttacgctgtttcttattctgttaattaccgttgccggcattctctcgttccttggactggggcgcgcagaagacccgccctttacggttaagcagatgaccatcatttccgcctggcccggagccacagctcaggaaatgcaggaccaggtagccgaaccgctggagaagcgtctccaggaactcaagtggtatgaccgcaccgagacctacacgcgccccggcctggcttttaccatgctctcgttgcaggacagtactccaccttcagaggtccaggaagagttctatcaggcacgtaaaaaactcagcgatgaagccaggaacctcccagccggggtaattggtccgatggtcaatgatgagttctcggatgtcacgtttgcgctctttgcgctgaaagcaaaaggagagccacagcggctactggttcgtgatgccgaatcattacgccagcgcttattgcatgtacccggggtgaaaaaggtcaatattatcggcgagcaggctgagcggatttttgtctcattttctcatgaccgtctggcaacactgggtatctcaccgcaggatatctttgccgccctgaacaaccagaacgtgctgacgcctgccggttcaatagacactcgtggtcctcaggtttttatccgtctggatggggcgtttgacaagctggagaaaattcgtgaaacgcctgttgtatcacagggaaggacgctgaagctttctgatgtcgcgacagttgagcgtggctacgaagatccggcgacttttatggtacgtaaccagagtgagcctgccttgttgctgggtattgtgatgcgtgagggctggaatggtctggatctgggtaaagcgctggataaggaagccgccagcatcaatacggatatgcctctcggcatgacctttacgaaagtcaccgatcagtccgttaacatcagctccgccgttaatgagttcatgatcaagttttttgtggcgctgctggtcgtgatggtggtctgctttctcagcatgggctggcgcgtgggcgtggttgtcgctgcggctgtgccactgacactggctgtagtctttgtgatcatggaagcgtcaggtaaaaacttcgaccgtattaccctgggttcgcttatcctcgcgctgggattactggtggatgatgcgatcattgccattgaaatgatggtggtgaagatggaagagggttacgaccgaataaaagcctcggcgtatgcctggagccacgccgccgcgcctatgctggccggtacgctggtcacggccgtcggctttatgcccaacggttttgcacaatccacggcgggtgaatacaccagcaatatgttctggattgtgggaattgccttaatcgcctcctgggttgtggcagtggtctttacgccgtatctcggggtgaaaatgctgccagatatcaaaacggttgaagggggacatgatgctatctacaacacccgacgctacaaccgttttcgtcagttactgacgcgggtgatcgcacgaaaatggctggtcgcgggttcagtcgtcgcggtgttcaccgttgccgttctcggcatggcactggtgaaaaaacagtttttcccgacgtctgatcgaccagaagttcttgtggaagtgcagatgccgtacggcacctctattgaacaaaccagcgccgccgtaacgaaaattgaggactggctcaggcaccagaaagaggcaaaaatcgtgacggcttatatcgggcagggttcaccacgtttctacctcgccatggcgccggaactgcccgatccctcttttgcgaaaattgttgtcctgaccgacagccaggaagcccgtgaggcgctcaagtttcgtcttcgccaggctgcggctgacgggctggcaccggaggcacgtgttcgcgtgacccagctggtatttggcccgtattcaccctatccggttgcctttcgtgtgacagggccggatccgacggttttacgggacattgcagataaggtaaaaacgctgatgcaggccagtccgttgatgagaacggtcaacacggactggggatcacgcgtgccgacacttcatttcaatctgaatcaggatcggctgcaggcggtggggctgacgtcaaacgcggtggcccagcagcttcagttcctgctttcgggcgtaccggtcaccgctgtacgtgaagatatccgttcagtgcaggtcatgggacgtgctgccggcgatatcaggcttgatccagcgaaaatagctgactttaccctggttggttccgcagggcagcgtatccccttatcgcaggctggcgaggtcgaagtgcgcatggaagatcctgttctgcgccgtcgtgatcggatgccaaccattaccgttcggggtgatattgctgaatcccggcagccgccggatgtctccactgcaattatgaagcaactgcagcccatcatcacaacgctgccggatggataccgtattgatgaagctggctcgattgaggagtcagggaaagccaccaaagcgatggtacccttattcccaatcatgatagccatgacactgctgattattatcctccaggtacgctcgatgtcagcgatggtgatggtctttatgactgcgccactgggactggtaggcgtggtgcctaccctgctgctctttaaccagccttttggcatcaatgcgctggttggcctgattgctttgtcaggaatcctaatgcgtaacacgctgatcctgatcggccagattcaccataacgagcaggaaggacttgcgccctttcatgcagtcattgaggcaacggtacaacgttccagacccgtgctgctcacggcgatggcggccattctggcctttatcccgttaacacattcggtgttctggggaacccttgcctacaccctgataggcgggacactgggtgggaccattattactctggtgttcctgccggctatgtatgccatctggttccggatcaagaggccggattcaacctcgtcaacggaaaaacatttcagctcagaaggattaaaaaatgtctga

SEQ ID NO: 497 - DNA, 813 bp, Kosakonia cowanii
  source 1..813: mol_type = genomic DNA
atgcgaatgaatgccaaagagctgatcgccgacgccagagtgacagcccctactctgccaccagcagcagcaaagctaatgatcgctatggcagaccgcctcaatgttcagttcgtggcgctgtgcgaatcgcgtaacgaggcgaagcagctggctggagagaatgctctgatgaagtcggctattaagactcacagcgaatcggtccacttctgcgtgggttgtggcaaagatgatccatgcagcaatgacgatgtttgctatgcactcgaagaaactcccaccactgatgcactcctcgcctccctgcgcgcagaaggggtggaggtgctgcggcagcatccggcaatccaactttgcagcctgacccatgtgtgcgatgaagtggccgcccagctgcgcagcaaatcagtttccccagccggagtcgaccagcctcccgcctccccagcaatcacaccacttccagttgagcgcaatcagtatggctactggactcacccggtgtatgaagaattctgtgacggtcgcgagtatatctccaacgaagatttcaacgtctggatgaaggataacgggctcgaatggaaagttgactaccgggatgaagaagatattgccccggaagttgatggctatgacctctcggcatgggagcccaaagcgccagcgggtgaaggttggttcgtcggctccattcacgatacagacgatggtgcagtttgcatctggcttcgcaataaatccgaaccatcccccgagaccgtagctgtcgcgcgccagtttgaacagttgaaggaggctgaaaagtga

SEQ ID NO: 498 - DNA, 1320 bp, Kosakonia cowanii
  source 1..1320: mol_type = genomic DNA
atgatttacacaactggctccatcgaggtcagcggcaataccctgaccggcaccggcacgaatttcagcgcagcaggctctcttatccgtaccggctgcacggtgctggcactgaccagcccggcgcaggcattccagatcaccgccatcaacggggcgaccagcctcacggtgacgccggcggccagcccggcggtgcccgccggcacgaagtttgccattctgctgagtgacagtctttcggttgacggtctggcgcaggatattgcggagaccttcaccatgtaccagcgctacatgggcggcttttctgatgtaatgaccggtaccggcgatgtgacaatcaccatcaacgggcagcctgtaactgttcccgcgcagaaagcactggcgaaaaaaggggctaacagcgatatcacctccctcaccgggctgacaacagcgctcagcattgaacagggcggtaccgggggaaagactaaagccgaagcgcgcgcgtctttatcagttgcgtcctcgggcgcgaacacagatatcaccagtatttccggactgaccacgcctctggctgtttcgcagggtgggacgggtgcaaccaccgaatccggcgtgcgccagaagatcggcgcagcagcatctggtcgcaattccgacatcagtcaaatcagcgggttacagattccggtgacgtcgattacatccattcccggcgacggaagtcgtggtatttttgctgagtctctgtcgccagcgaattatgacgtcgtgaccaagacactgctgtcaggccttaaaacgaataactggtcgctgtacagctccttcggcatgtatggcggcgggtcaggaactgcggcgcaggcgggacctgccgtttgcgtcactgacggcggttcattcggcgcgcgctggtttttcagggtaaacggcagcgtgatttctaccgctaacggtgacatcacgccatcagtatcagatgaacgtgttaaaaacatcatccgcgaaataacggaggaggaggcagttgcctttattactggcgtcagacccatccgctacgcattaaaatggacgccggagcaggtcaaggtcgggtacagcgcgcagaatattgaatcccttgatccggaaatcatctccacctcggctctgagtgtttacaatcccgacgatggcagcactgtaacgtatgaagacggaaagatactcgacccgggtgaagtcggggcggcgtacttggtacctgtcgtgcaacaactgttgcggcgggtcagcgagcttgaagccgcaattaaagctttgaaccctcatgggtcgtaa

SEQ ID NO: 499 - DNA, 711 bp, Kosakonia cowanii
  source 1..711: mol_type = genomic DNA
atgcgggacaagacaattagctccattctggagcatgcggcgcaggcgttcccggctgaatgctgcggtgtggtgatccagaagggacgggttgagaagtatgtcgcctgccggaatctggccacatccccggaagagcagtttgaactgtcgacggaggattacgcggcagccgaagagcagggcacggtggttgccgtggtgcacagccaccccggcgacggcgccacaacgcagccgagtgaactcgacatgctgatgtgcgacgcgaccgaagtgccgtgggtaattgcctcatggcctgaaggcgatattcgcaccatcatgccgcgcggcgatcgcccgctgaccgggcgtcagtttgttctcggacatgctgactgctggtcccttatccgggattacttccgcactgaacacggtatcgaactgcccgactacagcgtcgatcgtcactggtgggaggagggcgaaaacctctatatggataactggtacgcatgcggtttcagggaattcgatggtctatcccggcccggcgatatggtcattatgcaggtgcaggccagcgtgccaaatcatgccggcgtcctgctggaaggcaatatgctgctacaccacctgtacgggcagctcagccagcgcattccgtatggcggctattaccgtgaccggaccattaaagttttacggtacaaggacctgatgtaa

SEQ ID NO: 500 - DNA, 339 bp, Kosakonia cowanii
  source 1..339: mol_type = genomic DNA
atggcagttgaaaccttctcctggtgcccgaaggtggcggcgcaggcagataccagtttccgcatccggaaggcgcagttcggggataattacgcacaggtggccggggacggtattaacccggtcacaccgcaatggagcgtgagttttaccggcgatgaagcgtatgtccaggccataaaggcgtttctgaagcggcatgccggctggaagtccttcatctggaagccgcccctggagcccgcggggttatggcggtctgaatccctccagatagccacccacggcgcagatctttacaccctcagcaccacattcattcaggcataccatccatga

SEQ ID NO: 501 - DNA, 3492 bp, Kosakonia cowanii
  source 1..3492: mol_type = genomic DNA
atggcaacgcttcgcgaacttattataaaaatttctgctgactccagctcattccagagtgagatcacccgcgcctctcgcatgggctccgactattacagaacaatgcaggcgggaggccgccaggcggcggcggccgctaaagaaagtgaaagggcgttatctgatctcactaatggttttgcctcagcaggtaaagccgcagctgcggcaactgcggcttttgctacagggaggctggtgcagattgcagacgaatggaactcagtgaatgctcgtcttcaacaagcttctgcttctgctaatgattttgcgacttctcaacgtcagcttatggatatcagtcagcgaaccggtacagcgttctctgataatgccaacctctttgcccgcgcagctgcatcgatgcgcgaatacggttatagctcggaagaagtgctcaaaatcactgaagccgtttcaaccgggctcaagctttcaggcgcgagcacacaggagtcaagttcggttattactcaatttagccaggcacttgctcagggcgtattgcgtggcgaagagtttaatgcggtaaacgaatcgggtgatcgtgtcatccgtgcccttgccacaggcatgggtgttgcgcgcaaagacctcaagagcatggccgaccagggcaagctcactatcgataaagttgtgccagcgctaatgagccagcttggggcgttacagggtgagtttgcaacgatgccgcaaactgtatctggctctctccaaaaggtcactaactcctttatgggatgggttggaggtgttaacgctgcaacaggtgccacggatgcgctgtccggtgggcttgatggtgtagcccagacactggactcctttacttcatccgcagtgagcggtgctctgagtgatgtggccgacaatatgtcggttatcactaccgtagcaggcgcgctggtgggcgttggcctggctaagtatctcagcggaattgttaccagcgccacgagtgcgacaggtgctttgatctctgccgcgaaatcggaagttgccctcgctgtagcgcaagacagggcagcccagtcagctgtggcggcctccagagctgatgtctatcgtgcacagcaagctttgcagagagcaaagggcgctgatgttcaggctgctcagcaggaaaaaatagcagccgcagaggcaaaggtaacagcaacacagtccgggctcacgacggctcttgccggaggtacagcaacagagaaagtcagggcaagagcagcgcttgagcgtgctcaggcaggtcttgcagctgctaaaaatgcggacgtacaggcagttgctgaacgacgactggcacaggcagaggccgcgcgtgacaggaacctggccaaccgtgtctcaacccaaagtaatctaaacagtgtaaccgctgtcggatcgcggctcatgagtagtgctctgggaattatcggtggtattccaggtctggtgatgcttggtgcaggagcatggtatgcggcgtatcagaatcaggaacaggctcgccgttctgctcaggaatacggcagaacgatagatgagataagcaaaaagactagggcgatgtctttgccggaagcttccgacaatagtgaaaaagccaaaaaagctcttgatgaacagaacagacttatcgatgagcaaaaaagcaaaattgaaagtctgaaagagcagattgccggatcgcagtatctaatcaacaaccccggcccgactacgaaaggtggtttcatgatcaaccaccttacctctctgaagactgtaactgatgatatgtcgactgcaactgagcagttgtcggttgaacaggaaagactttctcagatgcaggagaaagcagcctccatccaacaaactctcgaggggctccagtaccgtcgggtctcgctgattagagaggaagcggctaatcagaattctgcctaccagtctctgctgatgatgaacggccagcatcaaacatttaaccagcttctcgggctcggcaatcagttactgatggcccgtcagggaatgacactggcacccctgcgtgttcctcaggctgaagcctcgcagaaacagaccgatgcgctcgaaaaaagccggcgcgaactggccctgtcccgacttaaaggtgaggcaaaagagcgcgcccgccttggctatgctgctgatgagctcggtctgacggctgatccgcaattccagaccaaccggcttgagtacatcaataacgggcttgaagagtggcgcaataacgaggccaacaaaaagcagcccaaagggccaaagacggacgaagaaaaggctgctgatgcttataaaaggatgatcaagcagcagaaggagcagatcgcccttcagggccagagcaccgaacttgccagggtgaaataccaggtggttgaaggtgaattgtccaccctggacaaggcgcagaaggctgaactgatgcgcaacgctgcgttaatcgatcaggtcaaacttcgcgagcagctgcgtaattacgaggcgaatctggctgacagcaacgccagcgcccgggcggccaatgatgcgcagctcattggttacggtcagggcacccggttccgtgagcggatgcaggagcagttcaatatccgcaaggagtttgagcagaagaataccgatctgctccggcagcggcaggccggggatatagatgaaaccttctaccagcaggggctggcactcaacaaaggctatctggaagagcgactgcgcgaccaggaagggtattacaccgcttccgatgcgcagcgcggtgactggttaacgggcatgtctgagggctatgcgaactgggtggacgaggcgaccgactattccgcgatggctgccgacgggatgaagcaggccatgggcggggcggtgaccaccattaccgacatgctcaacggcaacctagacagctggaaagactggggcatgaacgtcctgaaaattatcgagaccgttctcgttaatatgatggtggcgaatgccgcaagttctctcggttcgcttttcagctttggtgcctcatccgccgcaacggccagcagcgggacggccattcagagcgctgcgtcaaatttcaccttcaatgccaaaggcaatgtctacgactcaccttccctgagtgcatacagcggtggcgtctaccagaccccgcagctgtttgcctttgcgaaaggggccggggtgtttggcgaggcaggcccggaggcgattatgccgctcacgcgcgcggcggatggttcgctcggcgttcgcgcagtcggggcgccgcagttttccggcggtggcccgtccgtgtcgtttggcgatatcaacatcaacggcggtgcgcagtccacggcaggacagggggctgccgcaactgccggcaggcaactcaaggatgcaatcgtgacggtgattaatgagcaggccacactgcccggatcgccattgtggcggcttttgaaaggagcataa

SEQ ID NO: 502 - DNA, 3762 bp, Kosakonia cowanii
  source 1..3762: mol_type = genomic DNA
atgacgaacacagtgattaaagggcggaagggtggtggcaccaaaactcgcaccccggtggaagccccggacagtattcagtccatagccagagccaaaattcttgtcgcgctcggcgaaggggagttcgctggcggccttgacgggcgcagcatttatctcggcgacgcgtcatcgtataccccgctgcagaatgccgacggcagttttaacttcaacaacgtcaaatatgaattccgttccggcacccaggatcagacctacattcagggctttccgggcgttgagaatgagttgcaggtcgcctacgagcttaagcaggctgtgccgtatgtccgctctgtctccaatacccagctttcagcactgcgcatccgcctcggctggccctcgctgctaaaccagaaagacaacggcgataaggtgggtacccgcgttgagtatgcgatcgacctgtctgttgacggcggcacatatgtgacggtggtcaacggcgctgtcgatgacaagaccacctccctctatgagcgcagtcaccgtatcgacctgccaaaagccaccactggctggcagctgcgcgtgcgccggataacgcctgactcaacgacggtgaatgttgtggacagtatgcgcgtcgaggctgtcaccgaaatcatcgatgcaaagctgcgataccctaacacggcgttgctctacattgaatttgatgcgaagcagttcccgaacggcatcccgcaggtcgtgtgcaatccgaaggggcgcattattcgcgtgcctgatacctacgatccggaaacgcgcacctattccggcatctgggaaggtgggttcaaatgggcatggaccgataacccggcgtggatttattacgacatcgtgctgaatgagcgcttcggcctcggtcagaggattgatgcgacccagattgataaatgggagctgtaccgtatcgcgcagtactgcgatcaactggtgccggatggcaaaggtggcagcgctatggagccgcgctttcgctgcaacgtctacattcaggagcgcaatgacgcctggacggtgctgcgcgacctggctggcatattccgtggcatgacctactggggcgacaacaagctgtatgtgctggccgatatgccccgcgatatctggcacatctataaccatgccagtgtggtcgacggtaaatttaccttcgccgatccgagcgaaaccacgcgcaacactgccgcgctggtgaactggtccgatccggcgaatcactacaaagacacgcccgaagtcgtttatgacaacgatctggcgatgcgcttcgattacagccagctcgaaatgacggccatcggctgcacccgacagtcagaggcaaaccggcgcgggcgctgggcgctgctcacgaatggcatcggtgaggtggtgacgttcagcacgggtatggatgttccccctgtcggtgaggtgatcggcgtggccgcgaacgaactggctggccgtgtgattggcggcagggtaagcgcggtcagcggtcgtaatatcacgctcgaccgtgccgcggatgtcaacgcaggcaaccggctcttcctcaatctgccgtcaggtgtggcgcaggcacggaccgtacaggcggttaacggcaacactgtcacggtcaccactgcctacagcgaaacgcctgaggcggagtgctgctggggtgtggatgctgacgatctgtttatcgcgctctttcgcgtaaccggcacccgcgacaatgacgacggcacttttgaagtgaccggcgcgacctacagcccggatatttacgctgcagttgatactggcgcccggctcgatgaaaggccggtcagcgtgattccgcccggcgtgcaggcgccgccggaaaacatcgttatcgacagctactcgacgatcagccagaacattgcgatcaccaccatgcgtgtggcctgggattctgttaaaggggcaatcgcctacgaagccgagtggcgacgcgacagcggcaactgggtgagcgtgccccacacgtcctctcttggtttcgaggtgccgggcatctacgccgggcgttatctggtgcgggtgcgggcggtgaacgccagcgatgtctcgtccatatgggcgacatcagctgaggtcacgctcaccgggaaagtgggtaatccgccgaaaccggtaggcttcactgcctcggaaactgttgtgtttggtatcgagctgaactggggcttcccggcaaacacggacgacacgctgaaaacggagatccagtacagcctgaccggcagcgatggcgatgccatgctgctggccgacgtcccctatccgctgcgtaagtatcagcagatggggctcaaggccgggcaggttttctggtaccgcgcgcagctggtggaccggaccggtaacgaatccgggtataccgactgggtacgcggccagtccagctccgatgtgacggacattacagaggccgtgctcgagcagatcaaggataccgaactattcaaagacctcatcgagaacgctgtggagagcagccaggcggtcgcggatctggctgaggcagttaaacagaacgccgacggtctggctgcggcggccggggcaaaccaccagacggcagaagccattatcggcaatgctctggcgatcgcggatgttgttgtccggcagtcagcccagcagggcgctaactcggcgcggttcgaacagttgcgcgaggttattgccaccgaaaccgaggcgcgcgttacggatgtaatccgcctggaggcgaagacggatcagaacgccgcaggcatcacagaagtgcgccaggcgctgtcaaacgagagcgaggcccgcgcttcagctgtagacgagctgaccgcgaagacggagaaaaacgcggcaaatgtcaccgtgctgaaccagaccgtgacggatctggactcctcgaccgcctcgcgctttgaggaaatttcggcagagatcgcgggcattgatggcaatgaaatcagagggggaatacagagcaattccatcgcgcttatcaccaacacgctggcgcaggtcaacacccgaaccctgctaagcgtgcagtacggcgacaataaggcaggtattcagcgcgttgacaacgtgatggcggacgccagccaggccgtcgcggagtcgctcaggacgctggatgccagcgcaggcggcggcacggcaaatgccactgactttgccaaaacaatggcaaacttctcacaggtttccgccactaaaattaactccctttcagtgacggtaaacggtcagcaggcggcaatcgtccagaattcgcaggcagttgcagatatcagcggtaatctttctgcgatgtacagcatcaaggtgggcgtcgatgccgctggccgccagtacgccgcaggcatgggtatcggtgtgcagaacaccccggcgggcatgcagtcgcaggtcattttcttggcggaccgtttcgccgtgatgtcacaggccggcgggacggtgagtctgccgttcctggtgcagaacgggcagaccttcatcaacgaagcctttatcaattacgcgtcaatcacactcggcaaagtgggatcgtggtattccgccaattatgtggccgggcagaccgggaccatcatgaaagcggacgggacgtttgaggtcaacggcgcggtatcgggccagggaaggatgcagataacgaacaaccgcatcatctcttttgacgcacaaaaccggccggcagctgttatggggcaacgcttataa

SEQ ID NO: 503 - DNA, 759 bp, Kosakonia cowanii
  source 1..759: mol_type = genomic DNA
atgagcatttcatctgatgtccagaaactggagccggggagccgcgtccgccttatcgaggtcgacggcgaagcgttcggtgccggcattctgcggtttcataacgaaactatccctcacactgaggccgagatcattgccgccggcggcgatgcgtcaaagcttccgccgaagtctgtctggtggcaggggctggagtacggtgcgtggccctttgaactgaccggcctgtccgtcagcagcgacgggcagagcgcccgaccaacactgaccgtggcaaatatcagcggcacgattggcgcgctctgtcgccgctttcaggggatggcaaaggcaaaagtgattatccacgagaccttcgctcattaccttgatgcccgcaacttctccggcggcaatccgggtgctaatccgaatgaggagcgcaagcaggtctattacatcgaccgtaaatccagttcggatgatgaaaccgtggagtttgaactgtccagcccggcagatctgcggggacagcttattcccacgcggcagatccagcccatgtgcacctggtgcatgcgcgggtggtacaaaaccgggaatggctgtacctatgccgggcagaatggctggttcgataaggacggcaaccgggtcgacgatccttcaaaggacgtgtgctcaggcctgctgtccaccgggtgtaaaccgcgattcggcgctgacaacgagctcgattatggcggctttccgggcgcgtcacttctgagggggtaa

SEQ ID NO: 504 - DNA, 600 bp, Kosakonia cowanii
  source 1..600: mol_type = genomic DNA
atggaaaaacgaaccgttatcaaactgagcggatcgatggcgcagcgcttcgggcgcacgcaccgccgggcgctgtcctctgccagcgaggttttcagggcgttgtccagcacggttgacggctttgaggattatctccgcgaggcgcgcgccaggggactcgatttcgtcatcttccgcgatcgccggaacatcagccaggaagagttttcgcttctcggccccggcgatgagctgcgcatcattcctgttatccgtggcagcaagcgtgccggcatcttccaggcggtgctcggggttgctctgattgccgggggtatcgcccttggccctgccggggcagggcttattggtaaaggggttgcgctgaatgttgcgctggttggtgcatcgatggcgctggggggcgtggttcagttgctgtcgccgcaggtggcggggatgaggatgcgtcaggatccggataacaagccttcctatgcattcggcggcccggtcaacaccaccgccagcggcaattccgttcccctgctctatggccagcgtgagatcgggggcgctatcatttcagccggcatttatgcggaagatcagcagtaa

SEQ ID NO: 505 - DNA, 759 bp, Kosakonia cowanii
  source 1..759: mol_type = genomic DNA
atgaacctcgaatcattaccgaaattttattccccgaaatcaccgaagcttaacgatcagacgccagcgtccggcggcgtcgcgctgactatcaccgatgtaatggcagcccagggcatggtgcagtcgaaagccagtctcggttttaatcttttcctggcgaaaatggggattcaggatccggcacctgctattgatgggctgatgcaatatgcgctggcgctgaaaaatccggtgctggggaagctgagtgagaaggcacgcggtgaagttctgtcggtgctggtgcagtttgcctatgcagattattcgcgttcggcagccagtaaatcgacctgcccacattgcgaagggaaaggcgtagtgagggaaatgcaggacgtagttaagcatcctggcgttaatggcgtagaggcaatggttaagcacgaagccgtagaagtgatgtgccagcactgcgcgggcaaaggagaggtgggcacggcatgccgcggctgtaaaggtaagggaaccgtactcgatgagaagagaactaaactcatcggcgcgccagtcagtaaagtctgcagtcgttgcaatggcaaccgctacagccgtttgcctacaacccttgcgcgggcgcgcatagagaagattatccctgatctgaccagctaccagtggtacagcggttatggcgatgtaatagcgctactggtgacaaaatgctggcaggaagaggctttcgccgaggcgcaactgcgaaaagtaacaagatag

SEQ ID NO: 506 - DNA, 252 bp, Kosakonia cowanii
  source 1..252: mol_type = genomic DNA
atgaaaataattaacgctgcggcggttgtgctggtttcgatactggcggcaggctgcgccagcagcacgccgccgctgtgctataacggggcggtggtgataaaaaaccgggtatcggttccggtattcggcataagaaaaccggtcagcaccaccgaatatctctctggcggcagcttcggttatcagtgggttgagcggagtgcttttacggatacctcgtcctgcgacaggctgccgctgacggagtga

SEQ ID NO: 507 - DNA, 954 bp, Kosakonia cowanii
  source 1..954: mol_type = genomic DNA
atgcagatgtttattgcaggcaccagatttgaggccatcaatgtcatggcggccagctatgttctggatgtcatcaccatcaccggcaccgggagtaaaacctactccctgcccggggtggaactgacgtatgccattgtgaatgactttatgggagggcagttaaccggtgcgacctacagcgtcagtgtcagcggattaacgatttcgtggaacgtcaataacgccgttaccctgatcgtatacggcagtccggtggcgggcacactaagtgactattttggttatcagctttttcagtatttaaacggggtgaggacggtcaaactggccccaaattatgtcccgttgtgcctgcgggaaatcatcgatgtgcctgccggcgcgcgcactgtgcagacgcaggttcctgcgggcaatccggtgatgtgctttcaccggcacaccggggcggagatggatatctgctggtggaagcccgccacggccaacgggtatcacgcgctgcagtttcccacggacggcagcaatcagaccggatgccgggtgtatgtgttttcgaatattctcgcgaacattcctgactatgggttctatctctaccgcgacgggcagatggtctggcacagcaactgccttccccttcaggttataccgctgacgaacggggatatcaccagcaacacgccgctggcggtatcttccagcgtcacggcacacatcttcgtgccgcaggatccggtttatccgacggggtacagcaatttcatgtgtgcatcagcgggcaatgacgggacccgttataaggtgcaggtgggaaaagtattccagagcacgtatatcagcaatcccgacgagggcaggcgaatgcgggggtgggcatgtggcggggtggggtatatcgaaacgcagttctatgaccagtactataaatatgcccttggcctggcctga

SEQ ID NO: 508 - DNA, 532 bp, Kosakonia cowanii
  source 1..532: mol_type = genomic DNA
gcaggcgttcctgcccgtgttccggacgcagcagtccggcgtcgtcgtcaacatcgcgtcgatcggtgcggagggcgggtacccctacacctcggtgtactccgcgtcgaaggccgccgtgctgacgatcagcgaggccctcaacgtcgagatgcatcccttcggtgtgcaggtgaaggcggtgctgccgggacagcacgcgacccgcatcttcagcaagatcgacgggcccgacatcaaggtggacgcctacaccgctcagatccaggcgttcttcgaccacgtcccggagtccggctccgagccgtccgtcgtcggcgacgtcgtgtacacggcggcgaccgacggacgcaccgacaaggtgcactactacgccggcccggacgcgctcgccatcccacgcatgaagcgccttctcggaatcgaggactactggacggagttccaggccttcgcgctcggctcgcccagcccgctctggcagacgctcaacgtcccggcgggcaccgctccgctcgagcggatcatctga

SEQ ID NO: 509 - DNA, 570 bp, Kosakonia cowanii
  source 1..570: mol_type = genomic DNA
atgcgaatgaatgccaaagagctgatcgccgacgccagagtgacagcccctactctgccaccagcagcagcaaagctaatgatcgctatggcagaccgtctcgatgttcagttcgtggtgctgtgcgaatcgcggaacgaggcaaagcagctggctggagagaatgctctgatgaagtcggctattaaaactcacagcgaatcagtccacttctgcgtgggttgtggcaaagatgatccatgcagcaatgatgatgtttgctatgcactcgaagaaacgccagccactgatgcattcctcgcctccctgcgcgcagaagctcgcaaacagggcgctgtctttgcagcaaacagaatgctggcagcctgggatgctggttttattgaagacacaccagaaaacgcggcagatatcgcccgcgcaattctgatgtctacggaatttatggacgaagcacccgatggagatttcgatcgttctttcgctgatgaaatgctggaggcgatcgcttcccagctgcgcagcaaatcgaacgtggcggcaaaaaccatcgcaggggaaagccaatga

SEQ ID NO: 510 - DNA, 1464 bp, Kosakonia cowanii
  source 1..1464: mol_type = genomic DNA
atgatttatacaaccggttcaatcgcagtcagcggtaacacgctgaccggtacaggcacaaacttcactgccgcaggctctctcattcgtaacggctgcacggtgctggcgctgaccagcccggcgcaggctttccagatcacctcagtcgacagcgcgaccggcctcacagtgaccccggcggccagccctgcggttcccgccgggacgaagttcgccatcctgctgagcgacagcctgagcgtggatggcctggctcaggatatcgccgaaacgttcagtatgtaccagcggtacatgggcggctttgctgacgtgatgagcagcagcggagatgtgaccatcaccatcaacggtcagcccgttaccgtgcctggtcagcaatcggtggcgaagaagggggccaactctgacataaccagtctgaacggcctgaccaccgtactcagtatccagcagggtggtacaggaggaaaaactgcagcagaagcccggaataaaattggcgccgcgagctccgggaataacagcgatatcaccagtattacggggctgaccactgcccttggcatcccgcagggtggtactggaggaaaaacggcagcagaagcgcggactaaccttgggttgagtgatgtcgcgacgaaaaccgccggtacagccgaaggttcagtcatgctggtgggtgccatgggaacgccgacaggcgggtataaattttacaaaaccgaaggtgccattgctccgacgctcaactggaacgacatcacactgcccgggctttttccaaaccttatcgatgcatcgaactcagcaaactcgccgacggcaagcggctactactacgcgcaggttcttgtgcggggtgattccggggcggttcagcaaattgcgctgccttacgccacatctgcgtcaaacccggggcgcattctgtatcgcggcaaaaacggaaacacctggtcctcctgggctgaattttacaccacagcaaacaccaccaaagccagcgacggaacagtcaaggcggcttcgcccattgcacgtatcgcagcggacagaaaaacctgtctccggactgatatctctgatgatgggttcgcgtggtgcggttgcggtacagcaaatggtgaggctgaaggcatcactatttcgcggctcgatactggtgtttatgttatcgccggttctgcagggctggcatcttctggctggcaacttttacccccccgcgatccacagggttcaggtgatctgggtattgttgaggctgaagagactgaaagcggggggctgactatccggctgtataaacggcgctacgttctttcagaagacggagacattgagttacagaagggggcagcgattgatgtaccgccgacaagctggatcgatgtccgtcttgaaatgccagaaacaagtctctggaatcagcgcgctgctggccctcaggagcaataa

SEQ ID NO: 511 - DNA, 711 bp, Kosakonia cowanii
  source 1..711: mol_type = genomic DNA
atgcgggacaagacaatcagcgagattctggcgcatgcggcgcaggcgttcccggctgaatgctgcggtgtggtgatccagaagggacgggttgagaagtatatcgcctgccggaatctggccacctccccggaggagcagtttgaactgtcaccggaggattacgcggcggccgaagagcagggtacggtggttgccgtggtgcacagccaccccggcgacggtgccacgacgcagcctagcgagctcgacatgctgatgtgcgacgcgaccgaagtgccgtgggtgattgcttcatggcctgaaggcgatatccgcaccatcatgccgcgcggcgatcgcccgctgaacgggcgtcagtttgttctcgggcacgctgactgctggtcccttatcagggactattttcgcatcgagcacaatatcgacctgcccgactacagcgttgatcgccactggtgggaggagggcgaaaacctctatatggataactggcacgactgcggattcagggagttcgacggtccccagcagcccggagatatggtcatcatgcaggtgcaggccagcgtgccgaatcatgccggcgtcctgctggaaggcaacatgctgctgcaccacctgtatggtcagctcagtcagcgcattccgtatggcggctattaccgtgatcgcaccattaaggttttaaggtacaaggacctgatgtaa

SEQ ID NO: 512 - DNA, 339 bp, Kosakonia cowanii
  source 1..339: mol_type = genomic DNA
atggcagttgagaccttctcctggtgcccgaaggtggcggcgcaggttgataccagtttccgcacacgcaaagcgcagttcggggataattatgcacaggtggccggggacggtatcaacccggtcacatcgcaatggagcgtgagttttaccggcgatgaagcgtatgtccaggccataaaggcgtttctgaagcggcacgccggctggaagtccttcatctggaagccgcccctggagtccgcggggttatggcggtctgaatctattcagatagccacacacggcgcagatctttacaccctcagcaccacattcattcaggcataccatccatga

SEQ ID NO: 513 - DNA, 2028 bp, Kosakonia cowanii
  source 1..2028: mol_type = genomic DNA
atgggccgcgcgcttggcctgataggcggtgttccggggctcgtcatgctcggtgcgggagcctggtatgcaatgtatcagtctcaggagcaggcccggcagtcggcacaggaatatgccagaactattgatcaggtgagccaaaaaacgcgagcaatgagtttgcctgaagcagatgaaaatcgcggtaaaactattgatgcgctagttgaggaaaatcgcttaattggagagcagcaaaaagctatttcagcggtaaaaagacaaatcgatgagctgaataaggcacgcgctcagcccggaattactaaagataatgatctgaatatagttagagcgctcgccattcttaccgatcaattaaccgtagaagaaaataagcttaatttgatgcgggagaaatcaaccagtattcagcaggtgctggaagggattgatcgccgccgaaatgatttaatacgtgaacaggcttggcgtcagaatgctgcgtatcagtctctgctgatgatgaacggtcagcatcaacgatttaaccagcttctcgggctcggcaatcagctattgatggcccgtcagggaatgaccctggcaccccttcgtgttcctcaggcagaagcctcgcagaaacagactgaagcgctcgaaaaaagccggcgcgagctggccctgtcccgcctgaaaggcgaggcaaaagagcgcgcacggcttggctatgctgctgatgaactcggtctgacggctgatccgcaattccagaccaaccggcttgagtacatcaataacgggcttgaagagtggcgcaataacgaggccaacaagaagcagcccaaagggccaaagacggacgaagaaaaggccgctgatgcttataaaaggatgattaagcagcagaaggagcagatcgccctgcagggccagagcaccgaacttgccagggtgaaataccaggtggttgaaggtgagctctccacgctggacaaggcgcagaaggctgaactgatgcgcaacgccgcattaatcgatcaggtcaaacttcgtgagcagctgcgtaattacgaggcgaatctggctgacagcaacgccagcgccagggcggcgaatgatgcgcagctcattggttacggtcagggcacccggttccgtgagcggatgcaggagcagtttaatatccgtaaggagtttgagcagaagaataccgatttgctccggcagcggcagaccggggacattgacgaaaccttctaccagcaggggctggcactcaacaaacgctatctggaagagcggctgcgcgaccaggaggggtattacactgcttccgatgcgcagcgcggtgactggttgacaggcatgtctgaaggctatgcgaactgggtggacgaggcaacggactattccgcgatggctgccgacggcatgaagcaggccatgggcggggcggtgaccaccattaccgacatgctcaacggcaatcttgacagctggaaggactggggcatgaacgtgctgaaaattatcgagaccgttctcgttaatatgatggtcgcgaatgccgcgagctctctcggctcactcttcagctttggtgcttcatccgccgcaacggccagcagcggaacggccattcagagcgccgcgtcaaacttcaccttcaacgccaaaggtggcgtctacgactcaccctcccttagtgcctacagcggtggtgtctaccagaccccgcagctgtttgcgtttgcgaaaggggccggggtgtttggtgaggccggtccggaggcgattatgccgctcacgcgcgcagcggatggttcgctcggcgtacgcgcagtcggcgcgccgcagttttccggcggtggcccgtccgtgtcgtttggcgatatcaacatcaacggcggtgcgcaatccacggctgggcagggggcagccgcatctgccggcaggcaactcaaggatgcaatcgtgacggtgattaatgagcaggccagcatgcccggatccccattatggcggcttttaaaaggagcgtga

SEQ ID NO: 514 - DNA, 3804 bp, Kosakonia cowanii
  source 1..3804: mol_type = genomic DNA
atgacgaacacagcgattaaagggcggaagggcggtggcaccaagacccgcaccccggtggaagccccggacagtattcagtccatagccagagccaaaatccttgtcgcgctcggcgaaggtgaatttgccggcggcctggacgggcgcagcatttatcttggcgacgcgtcatcgtataccccgctgcagaatgcagacggcagttacaacttcaacaacgttaaatacgagtttcgttccggcacccaggatcagacctacattcagggctttcccggcgttgagaatgagctgcaggtcgcctacgagcttaaagctgctgtgccgtatgtccgttccgtctccaatacccagctttcagcactgcgcatccgcctcggctggccctcgctgctgaaccagaaagacaacggcgataaggtgggtacgcgcgttgagtatgcgatcgagctgtcggtcgacggtggtgcatacgcgcccgtggttaaaggcgctgtcgatgacaagaccaccaccctctatgagcgcagtcaccgtatcgacctgccgaaagccacaaccggctggcagctgcgcgtgcgccggattacaccggattcaacgacagtgaatgttgtggacagtatgcgcgttgaggcggtcaccgagatcatcgatgcgaagctgcgttaccccaacacggcgctgctctacattgaattcgatgcgaagcagttcccgaacggcattccgcaggtggtttgcaatccgaaggggcgcattattcgcgtgcctgatacttacgaccctgacacacgaacctactccggcacctgggaaggcgggtttaaatgggcgtggaccgataacccggcgtggatttattacgacatcgtgctgaatgagcggttcgggcttggtcagaggattgatgcgacccagattgataaatgggagctttaccgcatcgcgcagtactgcgatcagccggtaccggatggcaagggcggcagcggtaccgagccgcgctttcggtgtaatgtctacatccaggagcgcaatgacgcctggacggtgctgcgtgacctggcgggcatcttccgcggcatgacctactggggcgacaacaagttgtatgtgctggccgacatgccgcgcgatgtggcacacatttacaaccacgccagtgtgatcgacggtaagtttacctttgccgatccgagcgaaaccacccgcaacaccgccgcgctggtgaactggtccgatccggcgaatcactacaaagacacaccggaagtggtttatgacaacgatctggcgatgcgcttcgattacagccagctcgaactgacggccatcggctgcacccggcagtcagaggcaaaccgacgcgggcgctgggcgctgctcacgaatggtatcggtgaggtggtgaccttcagcacgggtatggatgttccccctgtcggggaagtgatcggcgtggccgcgaacgagctggccggcagggtgattggcggcagggtaagcgcggtgaacggtcgtaatatcacgctcgaccgtgccgcagatgtcaaagctggtaaccggcttttcctcaacctgccctcgggtgtggctcaggcacggaccgtgcaggcggttaacggcaatatcgtcaccgtcaccactacatacagcgaaccgcctgaggcggagtgctgctggggtgtggatgatgacgatctgtttatcgcgctctttcgcgtaaccggcacccgtaacaacgatgacggcacgtttgaggtgaccggtgcgacctataacccggatatttatgctgcggtcgataccggcgcccggctcgatgaacggccggtcagcgtcattccgcccggcgtgcaggcaccaccggaaaacatcgttatcgacagctactcgacggtcagccagaacatagcgatcaccaccatgcgtgcggcatggaaacccgtcaaaggggcgattgcctatgaggctgaatggcgccgtgacagcggtaactgggtgagcgtgccccgcacgtcctctcagggattcgaggtgccgggtatctacgccgggcgttatctggtgcgggtacgggcagtgaacgccagcgatgtgtcgtcgatatgggcgacatcagctgaggttacgctcaccgggaaagtgggcaatccaccgaagccggtgggctttaccgcctccgaaaatgtggtgtttggcatcgagctgaactggggcttcccggcgaataccgacgacacgctgaagacggaaattcagtacagcctgaccggcagtgctgacgatgccatgctactggccgacgtgccttatccgctgcgtaagtatcagcagatggggctgaaggccgggcagattttctggtaccgcgcgcagctggtggaccgtaccggcaacgaatccgggtataccgcctgggtccgcggccagtccagcaccgatgtgaccgacattacagaggcggtgctcgcgcagatcaaggataccgaactcttcaaagacctcatcgagaacgccgttgagagcagcaaggcggtcgcggaactggcagaggcagtgaggcagaatgccgacggccttgctgaggcggcaggcgcaaaccgccagacagcagaagccattatcggtaatgctctggcgatcgcggatgtcgtcgtgcgccagtcagcccagcagggcgctaactccgcgaaattcgagcagctgcgggaagttatcgccaccgaaacagaggcgcgcgttacggatgtgatccgcctggaggcaaagacggatcagaacgccgccggcatcaccgaagtgcgccacgcgctggcaaacgaaaccgaggcacgggcgacagctgtcgatcagcttaccgcgcagacggaagagaataaggccagtgtcacagcgctgacgcagaccgtgacggatctggactcatccactgcctcgcgctttgaggagatttcggcagagatcgcgggcatagacggcagtgacatcagagggggaatacagagcaactccattgcgctgattaccaccacgctggcgcaggttaatgatcgcacacgcctcagcgtgcagtacggcgacaacaaggcgggaattgagcgtgttgataacgtgatggccgatgccagccaggctgtcgcggagtcgctcaggtcgttggatgccagttccggcgccggcacggcaaacaccaccgactttgcgaaaaccatggctgacttctcgcaggtttcggcgacaaaaatcaactccctgtcagtgacggtaaacggtcagcaggcggcaatcgtccagaatgctcaggtttctgccgatatcaacaacaacctttctgcgatgtacagcatcaaggtgggtgtcgatgctaacgggcggcagtacgctgcaggcatgggtatcggcgtgcagaacacgccggcgggcatgcagtcgcaggtgctcttcctggccgaccgtttcgctgtgatgtcgcaggcaggcgggaccgtgagccttccgttcgttatccagaacgggcagacattcatcaacgatgccttcttcagggatgccagcattcagttcggtaagataaccgactccctgaagtcagataactacgccgcaggatctgcaggctggaatctgccgaaaagtggcaacgcggagtttaatcaggtgacggtgcgcggcgcaatttatgccaccaacggcaatttcaacctcaccgggccgggcaatacgaccgtgattaacggcctgggcgtcacggttaaccttgcaaacggcggtcttataagactggggagctggtaa

SEQ ID NO: 515 - DNA, 759 bp, Kosakonia cowanii
  source 1..759: mol_type = genomic DNA
atgagcatttcatctgatgtccagaaactggagccgggcagccgtgtccgccttatcgaggttgacggcgaggcgttcggcgccggcattctgcggtttcataacgaaaccctccctcacacagaggccgagatcattgctgcgggcggcgatgcgtcgaagctccagccgaaatcggtctggtggcaggggctggagtacggtgcgtggccttttgaactgacaggcctgtccgtcagcagcgacgggcagagcgcccgcccgacactgaccgtggcaaatatctccggcacgataggcgcgctctgtcgtcgctttcagggaatggcaaaggcaaaagtgattattcacgagaccttcgctcattaccttgatgcccgcaacttctccggcggcaatcctgccgctaacccgaatgaggagcgcaaacaggtctattacatcgaccgtaaatccagttcggatgatgaaaccgtggagttcgagttgtccagcccggcagatcttcggggacagcttattcccacgcggcagatccagcccatgtgcacctggtgcatgcgcgggtggtacaaaaccggcaacggctgcacctatgccgggcagaatggctggttcgataaggacggcaaccgggtggatgatccttcgaaggacgtgtgctcaggcctgttgtcgaccgggtgtaaaccccggttcggcgccaacaatgaactcgactacggcggctttccgggtgcgtcacttctgagggggtaa

SEQ ID NO: 516 - DNA, 600 bp, Kosakonia cowanii
  source 1..600: mol_type = genomic DNA
atggaaaaacgaaccgttatcaaactgagcgggtcgatggcacagcgcttcgggcgcacgcaccgccgggcgctgtcttctgccagcgaggttttcagggcgctgtccagcacggtggacggctttgaggattatctccgcgaggcgcgcgccagggggctcgacttcgttatcttccgcgatcgccgcaacatcggtcaggaagagttttctcttctcggccccggcgatgagctgcgcattattccggtgatccggggcagcaagcgtgccggcattttccaggcggtgctcggggttgccctgattgccgggggtatcgcccttggccctgccggggcagggcttattggtaaaggggtcgcgctgaatgttgcgctggtcggtgcatcgatggcgctgggcggcgtggttcagctgctgtcacctcaagtggcggggatgaggatgcgtcaggatccggataacaagccttcctatgcgttcggcggcccggtcaacaccaccgccagcggaaacccggtacctcttctctacggccagcgggagatcgggggcgctgtcatttcagccggcatttacgcggaagatcagcagtaa

SEQ ID NO: 517 - DNA, 759 bp, Kosakonia cowanii
  source 1..759: mol_type = genomic DNA
atgaacctcgaatcattaccgaaattttattccccgaaatcaccgaagcttaacgatcagacgccagcgaccggcggtgtcgcgctgactatcaccgatgtaatggcagcccagggcatggtgcagtcgaaagcctgtctcggttttaatctcttcctggcgaaaatggggattcaggatccggcacctgctattgatgggctgatgcaatatgcgctggcgctgaaaaatcctgtgctggggaagctgagtgagaaagcacgcggtgaagttctgccggtgctggtgcagtttgcttacgctgattattcgcgttcggcggccagtaaatcgacctgcccacattgcgaagggaaaggcgtggtgcgggaaatgcaggacgtggttaagcaccctggcgttaagggcatagaggcaacggttaagtacgaagcggtagaagtgatgtgccagcactgcgcgggaaaaggagaggtgggcacggcctgccgcggctgtaaaggtaaggggaccgtgctggatgagaagagaaccaaactcctcggtgcaccagtaaggaaagtttgtggtcgctgcaatggcagccgcttcagccgtttgcctaccacacttgcccggacgcgcattgagaggattattcccgatctgaccagctaccagtggtacagcggttatggcgatgtaatcgcgctactggtgacaaaatgctggcaggaagaggcttttgctgaggtgcaactgcttaaagtcacaagatag

SEQ ID NO: 518 - DNA, 1128 bp, Kosakonia cowanii
  source 1..1128: mol_type = genomic DNA
atggctgccagaccacgtaaaaataatgtcagcgtaccgaatctatatccgctgtatagccggaaggtcaataaggtttactggcgttataagcaccctatcacgggaaaatttcatgcccttggtactgacgaagcagaggctattgcaattgctaccgaggcgaatactcgtctggctgaacaacgctctcgccagatcatggcaattagcgacaaaatcgcgtccagcaaaggtaaagctataaccacaaacacctggcttgaccgttactggaatattcaaggtgagagactggatagtggcgatattaagctgaacacctataagcaaaaggcaaaaccagtagctttgctccgtgagcgagtaggtatgaagctgatttcgtcggtagatgtgcgagatatagctgaaatactagaagcctacatttcagatggccaacccagaatggcgcaggtgatacgctcagttttaattgatgtatttaaagaagctcaacattatggggaggttccccccgggtacaaccctgcccttgcaacaaagcagccgcgcaggcgtataacgcggcaacgccttaatctggaagaatggcaaaaaattttcgatattgccgacgcaaaccacaagtatatgggtaacgcgatgttgttagcccttgtgaccggtcagcgcttaggcgatatatccaacatgaaattcagcgatatctgggatgaccatcttcacattgttcaggagaaaaccgggagtaagatcgccattcccctcgcgctgaggttaaaggcaatcaactggagcttgcgtgaagtagttgcgcggtgccgggattatgcagtaagtccgtatctggttcattttttccgcgctacttctcaggctgaacgtggggcgcaggtgaaatccaataccttgacaatgaatttcagcaaagccagagataaagcgaatatagaatggggggatgggactccagcgacatttcacgagcagcgctcgttgtcagagcggctgtataaagaacaaggtattgatacaagaagattgctgggccataaatcccagcaacaaacagataggtatcacgatgatagaggaaaagattggagtaaagttaatatttaa

SEQ ID NO: 519 - DNA, 1269 bp, Kosakonia cowanii
  source 1..1269: mol_type = genomic DNA
atgatttacacaactggctctattgcagtcagcggcaacacgctgaccggcaccggcacgaatttcaccgcagcaggctccctcatccgtaatggctgcacggtgctggcactgaccagcccggcgcaggctttccagatcacctcagtcgacagctcgaccggcctgaccgtgtcgcctgcggcctcgcctgcgatccctgcggggacaaaatttgccatcctgctgagcgacagcctgagcgtggatggccttgcacaggatatcgccgagacgttcagcatgtaccagcggtacatgggcggctttgctgacgttatgaacggcagcggagatgtgaccatcaccatcaacggtcagcccgttaccgtgcccggtcagaaatcgctggcgaagaagggggctaacgccgacataaccagcctgaacggactgacaacagcgatcacacttgctcagggcggtacaggcgcaaagacggcagcaggagcacgcaccagtctggggctgggaagtatggccacccagagttctgacgcggtaaacataactggaggatccgggacattcaccagccttagctctgatgcggtggccatcaccggtggaacagcttctcttggcactatcgagacaaaagcgggtgcggagcagccactggtgatacgcaccaatccgacgagtggccttggctatatacgtttcagggatgcgtctgaaaatccactggcttatctgggattcggagcgagtggtgcccagcactttattctggcgagcaacatcggaggaaatagcgtcacgctgaatactaccggcgctgtgacagtaaaagccgggggcgctaactacgctttccagacaaacggaaccgctacggggcagctgtggcagagcacatccgatgtcaggatcaagaaggatataaagccgatcaccaatgcgcgagaagtaatcagtgctatcaatggttatacatttaaaaagcgatataacctctatgaagtcgccgaaccgctttataccgaagaagcggggatccttgcccaggagcttgagctggtggctccggaagccgtctcaaaaaatgatttcggcgcccacgacctcgaaaacaatccgattgatgatttacgcgcggtcaactatgcggggatcacaccatacctgatagagctggcgaagctacatgaggccgagatttccgatttgaagggagaagtggcacagcttaaggcactcgtgtcttccctggcacagggctcttaa

SEQ ID NO: 520 - DNA, 732 bp, Kosakonia cowanii
  source 1..732: mol_type = genomic DNA
atgaacaaaaccataatgtcggctatccgggcgcatgcgctggaggaatccccgcgcgagtgctgcggcttcgttatccagtctggccgtcgccagcgctatattcccgtaccgaacacccacgaaaacccgaccgagcatttccgtatcaatggcgagttctgggcgaatgctgaggacatcggtacaattatacgcgttatacattcccaccccggcgacggtgcacggcctataccgtcagacctggatcgccagcagtgcaacaactccggcgtggtctggggcatttacgcgccggacagcgatgaatacgccgagataatgcccgaggcggtgccgcttatcggccgcccgtttatcctgggttcacacgactgttgggggcttatcatggactggcacgccacccagggcgtcacgttagacgatttccgcgtcgattatccgtggtgggaaagtcagtacccggacaacttctatttcgataactgggagcaagaaggcttcatcgaatgtgacccggcgcccgggtgcatggtcatcatgcaggttgaatccgataagtggaaccatgcgggcattatcactgaagagggtgagttgctccatcacctgtatggccagccctcctgcattaccccctatgcccgcggctatttcaaggacaggacgatgatctgcgttcgccacaggagcctgccagaggagataaagccatggcgcgtttaa

SEQ ID NO: 521 - DNA, 351 bp, Kosakonia cowanii
  source 1..351: mol_type = genomic DNA
atggctgttgaaacctataaatggcccgcgcaactcggagcgggcgcaattgaatatagccagacaatccgggcctcacagttcggtgatggttatgagcaggtggctgaaaatggcatcaactctactgctattcaggttccgatgatttatgtcggcaaagaggagttgataaacgaaattcgctcattcctgctggctcataccgttaaggccttcatcatcacgccacccggcgaggagaaggggttgtatcgggtcgtcgcagattctgtgcgtaagaaccagatcagcagcaacgcagcagagcttactttcaccataaagcgcgcctacggcgtctatgcctga

SEQ ID NO: 522 - DNA, 3717 bp, Kosakonia cowanii
  source 1..3717: mol_type = genomic DNA
atgtctgatattgcaacaatttcgctccgggtgaataccgccgagctggagcgcggtaacaaggcgctggacgatttccagcagacggccagcggcgctgcaaacaaggccgatgatctgaactcggtatttcgcgcgggtgcatccgatcagaaaaagaatacccagagcctgaaagagcagcagcaggagctgcaaaacctgctgaataaaatcagtcctgttaaccgggcaatggacgagctggaaacgctgcaaagcaaactggctggctttcgtggtaagggactgctcggtaatgaggattacagccggtttagcgcagtgctggataccacccgagataaattatttcaggtcatggaagcggagaccgcagaagggcaggagcgactgaagctggctcaggacacgcagcgagccgccgcagcgcaggactcgttcctgaactctctgagcgagcaggctgcgaccttccgggcctcaaagtcagatgtgcttgagtatcgggcctccatactgggtttaacgcaagaagccgccccactgattcagcaaatcagggaaagagaactggctatcgccagtgaggctgtgcagacgaagcttgccgctcaagagcttcgtgagaaacaagccgcagaacgtcaggcgttagctgaggcatcccgcctgcaggcgcagaatgataacttcgtcgagtctcttcgtaatcaggcactggccatcggtaaatcacgtgctgaggtgcttgagctgaaagcggctcagatgggactgctgcaggaggcaggaccgtacatcgctgcgcttaaggcgcaggaggccgcaaccgcacaggaagcagcaaataaaaaagtttccgccatgcaatcccgcatgctccgggatgcgattgctgagctggaagctgcagagcgcgccgaggcatccgagatgcaacgtgcgcagaatatccgcgactcatttgtccggaccctcgaagaacaggccacgtcgatcgggaaaacccggatcgaattgctggaaatgaaggctgcacaactcggtgtttcccagcaggcagcaccttttatcgaaaagctgcgtgaacaggatgaagcgtggaagaagggcgggatcagcgccgggcagtaccggcaagcattgagaatgttgccagcgcagttcacggatattgccacatccattgctggtggcatgccattgtggatggtgctgatccagcagggcgggcaaatcagtgattcttttggcggtctgggcgggctttttcagtttatcaaggaagaggttcttgggtttaaagaggcaacagacgactcttcagaatcactttcagaaaatgcgaactcactggctgagaatgccgaacatggcaggggtatgcttgctttcctgactcctgccagggttgctgttggtgggcttgtgggggtggcttcacttctggcaattgcatggtacaaaggcgcccaggaagccagtgagttcaacaagcagcttatcttaaccggaaactatgctggtaaaacggcggggcaacttagtcaactttccaggcaaatagctgatgatgctggtgtgacaataggagaatcatcggcaacactggcgaaaattgttgggtcgggaagatttgatggaaataaacttgaggttgttgccagagcagctgcggccatggaagatgcggttgggcagtcagtagatactacgattgctaatttccagaaactttacgactcaccagtaaaggcgtctattgagctaaacagtcagttgcattacttaactgcggcggagtttcagtacatttcggctcttgagcgccgcggtgataaggaagaagcagggcaaaaagctgctgatagttatagtcgggcagaacagcaacgcagccagcaggttattgacaaccttggccttattgatcaggtgattcgtggcgtatctgatacatggaaagcatattgggatgcagccttaggtattggtagaaaagaatcgactgctgaacagcttgaggttgtgaggcaaagaattaaagaaatcaccaatcaatcccgcccaggtgtttttggtatgggtaatgtcggtgatggtggtgctgcaaaaagggagttggcggcattgcttcagcaagagagagagcttgggtttgttattaaatctcaggaaggtttcaaccagaaaagggctgagtttaataagataaatcaagatggtattgatgcgcagatatcgtttaataaatatttggatgctggaaccactcaggcagaaaaaagagctcttgcacaaaaggatttgaacaaagctattgccgataacgcgaaagcagttaaggctacgcagggcttgccttatgagcagagagtcaaaccattgactcctgaacaaatatctaaggcccgagctggcatagagaagctgtataaagatccaaagatccctaaagccaagggcataactgtggccgcaggcgatcgtgccgaagattctgcgcaggctgaacttctggccctccaggctcagctgaaaacccttcaggatcaccgctctgttaatgacaaaatcagtcagcagcgcaacgacctttatgccactgagtctaaatttgccgtcctggaagcggccgctagcacccggcagttatcgaagcaggagaagtctctgctggcgagcaaaagtcaggtgctgcaacttgcgcagcagaaagctcttcttggtgaccagatcaccgctcaggagcaactgaataggcggatggatacggcgcagaagtacgttactcagatggtggagaagcaagccgggcttgcatctggagccacaatgagtgacagacttgccgggcggcaggcgtctctgtctcagctgcgcagtggctggctcaatgcgggcggtggtctcaatgatgacggttataagcgggagttaaaggccgctaacgattactacgcagcagaagacaaactacgtggcgactggatggctggtgccagaaaaggctgggctgagtaccttgatgcggcaaccaacgtttatggctcaatgcaaagcgtcgcgcagtcagccctgggcggtatatcagatatgctgacaaacctggtcactaccggaacggccagtttcaaaagttttgccgcctccatgatgaagatgatcgctgatgtcattaaccgattactggtggcgtacaccgtgcaggccgcaatgggatggatttctgcgggtacctcatcagcaggtagtggtgcaggccagtcttttgctgtcccgtctttccggccagcgtggaacgggggatatatccctgaattcgacaccggcggttacacaggcgatggcggcaaatatcagccaaaaggggtggtacacggcggtgagttcgtctttaccaaagaggccacagctgcaatcggtgtcaataatctttatgcgatgatgcgtggtgctcagggatatgctgaaggtggggttgtcggcaggccgcccatgctggggctcatgtccggttctggtaatgctgcaccggtaattaacaccactgtaaacgttgatgccagtggtaacgcttcggctcaatccagcagctctggagacgctatggggcgcgccatggcggttgaaatacaaaacgctgcaaccctggtagtgcaaaagcacctgaagcccgggggcatgatctacaactttacgaagggacgttag

SEQ ID NO: 523 - DNA, 3783 bp, Kosakonia cowanii
  source 1..3783: mol_type = genomic DNA
atggaaacgatcactggtgcaaagggtggcagccagaagcagcacacgcctgtagaacagccagatagtgcccagtcgatggcgcgctgccgcatgctgctggcgcttggtgaaggggaattcgccggcggcctggatgcaactcgtatttttctggacgggacgccgctgggcaatgccgacgggacgatgaattttgaaaacgtcacatgggatttccggccgggcacccagacacagaccccgatccctggctttgccgcggtcgagaatgaaaccagtattggcgtatcgctgacgaaagttgccccctggacccgcgcgctgagtaatatccagattgatgcggtgctcgtgcgcattggcattcccggcctgcagcaacagcagaataatggcgacatcgttggtacgactgtcaaatatcacatcgacctggccgtagacggcggcgcgttctcgacggttatgaccaggaccgttaccgagaagctcagctcgctttatgagcttacccaccgcatcaaccttcccaaagccactaccggctggcagattcgcgtggtacgcgatacggacgacagcaccagccagctgctgcagaacaaaacgcaggtgcaggccattacagaggttatcgacgctcgtcttcgttatccgcacacagcactgttgtatgtgtcgttcaatgcaaaatcattcagcaatataccgaaaatctcctgtaaaccgaaggggcgcatcatccgaatcccctcaaactacgatccgatagcccgtacttacagcggcacctgggatggcacgttcaagtggggatggtcgaacaacccggcatggatctggttcgacgttctgaccgaaccacgtttcggccttggccgccgcatcacggcggatatgctggataagtgggagctataccgtatagcccaacgttgcgatcagaaggtgcccgacggaaagggcggcagcggcaccgagccgcgctttatgtttgacgtttatatacagtctcaggccgacgcatggcaggtgatcaaggatatcgccgccgggtttaacgggatgacgttctggggcaacaacatgttcaacgttgtctctgacatgccggcggatacgtcgaaactgcagatcctcaaccgcgcagcagtgatcggcaagccggtctactcaagtggcagtgaaaagacccgtttttccagcgcgctgattaatttcagcgacccggacaatcactatcaggatcgaactacggcggtgatgttcccggacctggtgaaacagttcaagtttaagcagacgcaaatcacagcgatcggctgtacgcgagagagtgaggctcagcggcgtggtggttgggcggtgtattccaactctcttgaccgcattatcaccctacaaactgggcttgatggctatgtctatgtgccgggcacggtgtttgcctttgccgatgaacgcctttctggtcgcgtgtacggtggtcgagttgccgcgtacaacggcgggctgaaggctgtgacaactgatcggggcaccagcgcggttgctggcgacactctgatgattcgcacgcagggtggaaccgtcgaaagtcgggttatccaggctgtaaatggtacgcagcttgtggtgtccacgcccttcaaagcggaccctttgccgaatgcagtgtttgttatagacgccgggcagttgagattacagtacttcagagtaactaacctgacgttcaatgatgaggaaaacacctactccatcacaggggcagaatataactcctctaaatatgacgcggttgataataatgcccggctggatacgccgccgatcagcctgattccgaccgggcttgttaatcagccgactaatatccaggtatcaagctttgaatcggtacgacagggccagcgcattactacactgatcgcctcctgggatgcgccacttgataaaaatggcaagcctcaggctgatgttatctcataccaggtgcaatggaagcgcggagataatgaatggattaatgtgccggaaacaggactacgcaatatagaagtgcccggtatttttgagggtgactatctggtacgcgtgcgtgccatcaactcaggaggggcttcaagtctgtgggcctcttcacttctgacacacctgaaggggcgcgtgggcgatgttccaaagccggtaggtctgtctgcgtcagaggatgtcgtatttggaatcaatatcacctggggttttccggccgatactgctgatacgctgagcacggaacttcagtacagcctcgctacagacggcacaaacccgatgctgctggcggctgtgccctacccgcagaaactctaccagcagatgggtctcaaggctgggcaggagttttggtaccgggccaggcttgttgaccgtaccggcaatcagtcagactacaccgactggatccgcggccagtccagctccgatgtgacagacattaccgaggcggtgctcgcgcagatcaaggacactgaactgttcaaggacctcattgagaacgccgtggacagcagtgccaaagttgcggaactggcagaggcagtgaggcagaatgccgatggtctggccgctgctgccgggtcgaataagcagatggcggaagccattattggcaatgccctggccatcgccaacgtggtggtgcgccagtcagctcagcagggcgctaactccgcgaagtttgagcagctgcgcgaagttatcgccacagaaaccgaagcgcgcgttacggatgtaatccgcctggaggcgaagacggaccagaacgccgccggcatcaccgaagtgcgccaggcgctggcaaacgaaaccgaggcacgggcgacagctgtcgatcagcttaccgcgcagacggaagagaacagggccagtgtcacagagttgacgcagaccgtgacggatctggactcctcgaccgcctcgcgttttgaggagatatcggcagagatcgcgggcatagatggcagtgacatcagaggggggatccagagcaattccatcgcgctgattaccaccacgctggcgcaggttaatgatcgcacacgcctcagcgtgcagtatggtgacaacaaggcgggaattgaacgtgttgataacgtgatggccgatgccagccaggctgtcgcggagtcgctcaggtcgatggatgccagttccggcgccggcacggcaaacaccaccgactttgcaaaaatcatggccgacttctcgcaggtttcggcgacaaaaatcaactccctgtcagtgacggtaaacggtcagcaggcggcaatcgtccagaatgctcaggtttcttccgacatcaacaataacctgaatgcgatgtacagcatcaaggtgggcgtcgatgccgctggccgccagtatgctgcaggcatgggtatcggtgtgcagaacaccccggcgggcatgcagtcgcaggtcattttcttggcggaccgtttcgccgtgatgtcacaggccggcgggacggtgagcctcccgttcctggtgcagaacggtcagaccttcatcaacgaagcctttatcaattacgcgtccattacgctcgccagggtgggatcgtggtattccgccaattacgtggccgggcagaccgggaccatcatgaaggcggacggaacgtttgaggtcaacggcgcggtatcaggccaggggcgcatgcagataacgaataaccgcatcatctcttacgatgcgcaaaaccggccggcagccgttatggggcaacgcttataa

SEQ ID NO: 524 - DNA, 774 bp, Kosakonia cowanii
  source 1..774: mol_type = genomic DNA
atgacagcccttattgatacggcagccatgcttgcacctggcggaaaagtccggctggtggaagtggacgcctcagaattcagtggtggtattcaccgctttcattacagtccttttccgcatactccccgggagattgacgaggcgcagggtgacgaaagtaagctcgggcccaagcctgtagtcttcgatggtaaggtctatgatttctggcctttccagttaacaggactggctctctcaactgaccaggcggcagagccgtcactcagcgtctcaaaccttgacggccatatcaccgcgctatgccttcagtttaaggacatggtgaacgcgaaggtgagcattatcgacacctatgcggtgtatctcgatgcggtgaattttcccgaccacgtcaatcccactgccgatccgactatgttcacgcttcagaccttctggctggataccaaaacgtccgaagatgacgaggtggtgacctgggggctaagcagcccggcagacctgcaggggctggtaattccaaccagacaaattacttccctctgtgaatgggcgctacgcggacaataccggagcggtgacggttgcacctataacggtacggcttacttcgacgcaaagggaaaccccgtagcggatccggcccttgatgtctgcggcggttgcctgagtgactgtcggaaacggttcggcgccgggcttgcagagccaaacgcagcgatcctcgattttggcggcttcccggcgacggttcttttcacccgataa

SEQ ID NO: 525 - DNA, 600 bp, Kosakonia cowanii
  source 1..600: mol_type = genomic DNA
atggcgcgtttaaccactattcgcctgtatggcgcgctgggcgcccggttcgggcgagtgcataagctggcggtgcagacatccgccgaagcggtaaaggccctgtgcatcaacttcgacgggctggaagactacctgatgaacgccaaaaagaacggtatgaccttcgccgtgtttcgtggaaagcgcaacataggcgtgcaggatttccaggagctggctggtaaaagtgatattcgtattgcgccggttatggagggggcgaagaaggcgggtatgttccagaccatcctgggcgcagtgatggtggttgccggtattatcgtcggcgtggcgaccggctggaccggtgtaggtctcacctttggtgccgggcttatcatgtcaggcgcatcaatgatggccggcggcatttaccagatgctctctccacagcctaaagggctacagggacgcgacgacccagacaacaaaccaagctacgccttcggcggttcggttaacactctggcgatgggtaatccggtggcgccactttggggcgagcgggaaattggcggtgcgatcatcagcgcaggcatagtcgcggaagacatttga

SEQ ID NO: 526 - DNA, 1083 bp, Kosakonia cowanii
  source 1..1083: mol_type = genomic DNA
atgcagaggccagcccgttacgacgctaacctgccccgtaacctgacctttcgcaagagagataagctttattcctggcgcaacccaataaccggccaggtaatctatctgggccgcattgatcgcagggaagcgatagcccaggccattgaagccaacagctatcttgatcagaactacatcccctccagtctacttcagcgcattaaagaaacgcccaccctgactatggctaaatggctggagaggtatgacattattctcgagcgaagggaattaaaaccaaacacaatgaaagttcgcaggaaccagattgagacgatcagaaaagagttcggcaccatcgctcttagcgcagttacaacaaaagacgttgcggaatttttggaaacatacattgcctgcgataaaaaaagcatggctgcaggtctgagatctgtactactcgatgtattcagagaggcgctcgtggagggccatatagaaaggaacccggcagaacctactcgcaccccggcaccaaaagttaagcgggaacgtctactgctcgaagcgtattttacgatacgagaaacagcagctgctaattcagtatgggcggcaaatgcatttgatcttgcactggtcacggctcagcgacgagaggacatagccatgatgaaattcactgatatccgggaagacagattgtttgtcatacaggagaaaacagggaataaattagccatccctttagacctgaaactggaagcggccgatcttcatttaaaagaagtgatagagcgttgcagagcgaacaatccatctgagttcctgctttactcgccggtgcgtcggggtggaagaaagcccggaccactgacgccggataggttgacccaggcattctcagatacccgtgatgtcactgtgcttaaatttggcccttacccgccgtcatttcacgaaattagaagtctggccagtaggctgtatgagaaggaaaaaggcgaagaatttgcgcagcggctgttgggtcataaaaacttatcaatgaccaaaaaatacctggactcccgtggggctgagtatgttacggtttag

SEQ ID NO: 527 - DNA, 954 bp, Kosakonia cowanii
  source 1..954: mol_type = genomic DNA
atgcagatgtttattgcagggaccagctttgacgccatcaacgccatggcggcaagctacgtactggatgtcatcaccattaccggcacagggagcaagacctactccctttccggtgtgtcgctgacatatgccattgtgaatgattttatgggagggcagttaacgggcgcgacctacagcgtcagtgtcagcggattaaccgtatcgtggaacgtcaataatgccgtcacccttattgtgtacggcagcccggtagcgggcacgcagagtgactacttcggcttccagctgttccagtacataaacggggcgaggacggtcaagctggccccgaattatgtgccgctgtgcctgcgccagattatagatgtgccggccggcgcgcgaactgtgcagacgcaggttccggcgggcaacccggtaatgtgttttcaccgtcactccggcgaggcgatggatttgtgctggtggaagcccgtcacggccagcgggtatcacgcactgcagttccccactgcggcaagtaaccagaccgggtgccgggtgtatgtattttcgaatattctcgcgaatatcccggactatggcttctttctctaccgggccggacagatggtctggcacagcaactgcctcccgctgcaggtcattcctctgactaacggggatatcaccagtgccacgccgctggcggtgtcatcgagtgtcacgtcacatatcttcgtgcctcaggacccggcatatccgacgggatacagcaatttcatgtgtgcatcagcgggaaaagacggggctgcatataaagtgcaggtcgggaaagtattccagagcacctatatcagcaaccccgatgaaggaaggaggatgagagggtgggcatgcggcggtgtcgggtatatcgacacccggttctatgaccagtactacaaaaatgcgctgggcatcacctga

SEQ ID NO: 528 - DNA, 1008 bp, Kosakonia cowanii
  source 1..1008: mol_type = genomic DNA
atggcaaagccggactggggagacctacagcgtcggttcctgtctgagcacgccaaaagcggtgtatcgccaaaagaatggtgtgaagcgcaggggctgaattattcatctgcgcgccggtacattaaaaagcccgcagcgcaaattgcgcaaaaaactgcgcagaaaaaagtgcgcaatgcgcagaaggaaatagacgttaatgcactggtggaaaacgacgggttgacagcgcagcagcgaatctttgtggcggaatacctgaaagaccgcaacgccacccaggccgccatacgtgccgggtacagtgcaaagactgctgagcaaattggttatcagctccttcagaaaacttcagtcgccgctgctattgagaaacagcaaaaggcctccttgatgcgaacgcttgccagtgctgatgaggtgctggcgcagatgtggcagctcgctacttttgacgcaaacgagctctcgcaataccgccgtggtgcgtgccgctactgtcatggcttcggccataactatcaatggcgcgatatggtggagtttgaagagcatcggcttaaagcaatcgagaaaaagggcaaagagccggtagacgtcggcggctatggctatgaccacaaccgtgaacctaatccggcatgccctcgctgcaatggtgacggcattggtcagccgtatttcgctgatacccgcaagctaccgcctgtttcccgcctggcttattccggcatcaagctcggtaagaacggggttgagatcaccgccatcagccgtgaacggatgtatgaagccgtgatgaagcggcttggcctggcggacagcgagtttgcgcagcagctgcagcagatcgaaatcgaacgtcgccagctggaggtggaaaaactccgcaaagagctggcagcagatccggaagatgaggtaccgatgcccgtggcaattaacattaacgtcgcggatgctcgcgtaaggaaagacgatgacggggatatcgccgacccttaa

SEQ ID NO: 529 - DNA, 453 bp, Kosakonia cowanii
  source 1..453: mol_type = genomic DNA
atgaacccgatcaacttcataaagaactattcgcacatcattgttatcggcctgatttgcgtggcgctgtggggactaaatgcccgtaacgcccagttaacagccactaatgaacggctggaaaagctggcgaacagcaaagacgaccagattaacgatctacgctcgaaaaacgacggcctggccgccagcgtgggcgagctggtcaccgccgtcaggcagcagaatcagctgatgtctcaggtcactgaacagcgcgctgtaaccgcacagcagaaccggaagctacagaatgaaattaagcaataccttgagactgataagtgtgcccagtctcgcgtgcctgataacgctgctgaccggctgcgcgccgcagcaaaagccgctggtggagtaccggacaataagccagccgcaaatcagccttccggcagaactgacctcccgcattga

SEQ ID NO: 530 - DNA, 1077 bp, Kosakonia cowanii
  source 1..1077: mol_type = genomic DNA
atgcagaacacaaacgtagcagtagccgaccagaacgctgtcgttaactcaaacatcgcgctgttcgattcacagtatcttaatgccatcagcactttcgcccagattatggcgcagggtgcggcgacagtaccgaaacaccttcagggcaaccaggccgactgtatggccgttgcaatgcaggcggcgcagtggcaaatgaaccctttcgccgtggcgcagaaaacccatctgattaacggcgtgctgggatatgaggcccagctggtaaacgcagtgatttcacgcagcggcgtgctggcgaatcgctttgagtatgagtggtatggcccatgggaaaaagtggtcggaaaatttcacatccgcaaaggtgaaaaaggcgaataccgggttccgggctggaccatggcggacgaagcaggtatcggcattatcatccgcgcaacgctcaaaggcgaagatcacccccgtgagctggatctgctgcttgctcaggcccgcacccgtaattcgacactgtgggctgatgatccccgccagcaactcgcctatctggcagtaaaacgctgggcgcgtctgttctgtccggatgtaatcctgggcgtttacacacctgatgagcttgaagatcgtcaggaaaaagaaatcaacccagccccgcagcagcgcgtcagcgttgctgatatcccggctgaatcgacaactaacagcgcgcaggagtccggtaccaatattgatggcatggccgacgagttccgcgatcgcattgaagcagctcaatccgtggaccaggccaaagccgtgcgggtggatattgaagcggccaaaactactctcggttcggcgctgttcactgaactgaaaaacaaagccgtacggcgctactacctagtagacgcccgcaacaaggtggaagcggcgatcaactccctgccccagcctgacgaaccggatgctgcagagcagttcaccaaagcagagcaggcactggctgctgcgaagcgccatctgggcgacgagctgtatgaccagtttgccgttaccctgctcgatatgaagcccgaatacgtggcatga

SEQ ID NO: 531 - DNA, 3396 bp, Kosakonia cowanii
  source 1..3396: mol_type = genomic DNA
atggaatttttctacttaatcaaggcaacgcagaagtcagggaaacctgacggcgttatctggttcagtgccaaaaccgaagcacgtgccgccctgacgctcgatgttgagctggaagaggctggtatcgaaactggccgcggtaaagactacgccaaaccgatccgcaccgattttccggttgttaacgacctgcctggagaaggcgtcgtcgacttcacctggtgcgatcgctatcaactggctgacgaccagcgtacctggaacgtgatccccggcgccgcgccacaggatgaaaccgacctttccccggccagcaccatcaacgatgcagatctgcatgccacgccggtgacgtccacggataccgttgatgcgggcaacacctcccagcttgaaaatcgcaccccgtctgtccgcttcgccgtccatttgctgggcgacaaataccattcggagatcagccaagaacagcagatcgtcgccaacgaattggctatggatgaggcaaatgtgtatttccagaacctgctgcaggccaaaaatgaagttcctgatatgagcgaactaagccttcacgctgagtggaaactggtgcaggctgtcaaagacgttttcccgcagcataaagaacacgaacccgcgctgctggctgctttcatgtcgagctgggtgaaagcagagatcggcgaacgtgcccaactggtcgaaaactggcttagcggcaaactgcccgcccctcaactcgccgataccagtgaacctggtgatgatgcgcctgtttccaatacagaagctcaacaggatgctacgcccgaagaggttgcccaggctcatgttcaggcatttcgcgatagggacattaccgagctgcacgctgttcctacgctgtcgttccgtcaccgcctcctcgcacagtttattaccgagaaggaatacgcgtaccacattgacaatgaacaactgaatacagtgcgccagctggaaatggacaccgataactcctacgtgcaaaacctgctgctggccgccgagaatgtcgaagggatgaaaaatcttcgtgacttcgagttctggaggcttaccgatgctgtcaagcgcgtatttccttctgacaaagcgacgcctgatttatctctgatgctccagttcatgaaggcctggaaaacgacggactatatcgatcgcggcctgctcgctaaggaatggattaacggtaaccgggtttcaaccattcagcgcaccgacaccggcacgaacgcgggcggcggcatcaaaacagaccgtaatgcagactatgagcatacgttggacacacttgatattgagatcgcgtgcgcaactttgccgatggattttgatatctacaatatccctggctctattcaccgccgggctaaagacattgttgctgcaaaagaaagtccctggaaagagtggtccacagcactgcgtaaaactgcaggtatcctggattactcgcgcgctgcaatttttgcgctcatccgcgaagcgtcctcaggcataacgacgttcccggatcgcatgactggttatatcagcgcgactctcaatgaatacaagcatgatacacctgaggccagaatcctcgccgctgcgcgtcagattgatagcgcggccgtggatgccggagtcattcagtgcgccgagccgtcacaccagctcgtcgccacccctctgccagaagtatccaacctcggcggcggcatgttttccatcgatggtctgctggaagaaaaagcaaacccggccatcaataccccctcaaacgaagtcgcaaaacaggaagtggagatcgttggcagtgtgcagatggaagagactgacccgagcaaagtcgaagccggtaatgcgttaccagcagtcgaaatcgctaatgaatctgctgcgcaaacaattagcgtaagcccggcggatatcctcgccgctgccacaccagaactgacgcgcaacgttgcccccgatctggaccagaatattgatgctcttagccaggatgagccggaattacctccaaccgaaccagaaatgacagaaatagaaccggtagcggatatttccgagccagaggctgctgctaaggaatggccagcttacttcgagccaggccgttatgaaggtctgccgaacgacgtttaccatgccgcgaacggcatcagcagcacccaggtgaaggatgcccgtgtctccctgatgtatttcgaagcacgccacgtctctaagaccatccagaaggagcggtcgaaggttctcgacatgggcaatctggtgcatgcgcttgcgctgcagccggagacactggtcgccgagttcagcattgagccggagatcccggaaggtgcactcaccaccacggcgacgatccgggagtgcattgacgagtacaacgccagcctgccgccgcagctgagcgctgatgatatcaaagcgctgctggaggcccataacgccaccctgcccgcgccactgccgctgggcgcagcagtagacgaaaccgcagaaagctatatggatctgccggaagagttccagcgcatcgagtctgataagaagcagaccgctgcagctatgaaagcctgcataaaagagtacaacgccaccctgcccgctccggtgaaaaccagcggcagccgtgacgtactccttgagcagcttgcaatcgtcaatcctgacctggttgcgcaggaagcacaaaagcccgtaccgctgaaagtatccggtaccaaaactgatctgattcaggcgctcaaggcggttcgcccggatgccgtgttcgccgacgaactgctggacgcctggcgcgagaatccggaaggcaaggttctggtgacccaccagcagttcgccaccgcgctgaacatccaggcagcgctgcatgctcacccgaccgcagggaaactgctgctacaccctgatcgcgctgttgaaaccagctatttcggcatagacgaagagaccggcctcgaaatccgtgtgcgccctgaccttgagctggacgtggatggcgtgcgcatcggtgccgacctcaaaacgatttctatgtggaacatcaagcagtcaggtctgcgggcgaagctacaccgtgaaatcatcgatcgcgattaccacctgagcgccggtatgtacatggagacggcaagcctcgaccagttcttctggatcttcgtcaacaaggacgaggggtatcactggattgccatcgttgaggcctctccggagctggtggagctgggcatcatggagtaccgcgccacgatgcgcgccattgccaacgcattcgataccggcgagtggccagcgccgatcaccagcgactacaccgacgaactcaccgagtacgatctgcgccgcctcgaagcgttgcgtgcggcttaa

SEQ ID NO: 532 - DNA, 270 bp, Kosakonia cowanii
  source 1..270: mol_type = genomic DNA
atggcaaagcttcttaatttggtggaatgggcagccagcgtatattccacccctccttcactatctactcttcgcagatgggtccgtgaaggcaagatctatcctgcccccgagctacacggtaaagagtataagctccgcccggatgctatctatgttgatccgagcaagaagaatttgcgcttgaaaccgcagcatctaaaaattccgtccaaagggactttactggagagattacagaatgcagaggccagcccgttacgacgctaa

SEQ ID NO: 533 - DNA, 678 bp, Kosakonia cowanii
  source 1..678: mol_type = genomic DNA
atgggcttcgcattacctaatggcgccacggtatttgtcggctcgaaacttgccacacctgtggcagtgacgggcgtcagcaatgccgcaggcgctgtctttaccgttgcaagcggccacggcctcgctgtaggcgatgtggtgctggtttccagtggctgggcactgattgacagcctggttgcgcgcgtcacggcgcagacgaccaccagcgtgacgatcggggtgattaacagcaccgataccaacttcttcccggctggttccggcacaggttccttaagcaaagtagccgagtggactgagatcccgcagatcaccgaagtttcacagtccggcggtgaccagcagtacacgcagatccagttccttgccgatgaccgccagcgcaacctggcgacctacaaggcggccaagtcgcagacctttacggttgcgcatgactccacgctgcctatctatgccgtgctgtcagctgctgaccgttccggtgacacgctgccgctgcgcatgtacgtgccgaaggcgaaggaaacgcgttactggtcgggtaagccgtctttcgatccgcagccaaccactgcgccgaatgccgtcgagacggtacagccagcgtttgccatccagtcccgtgatatcaccttttacaaagatgctgccccgcaggcagccgcttaa

SEQ ID NO: 534 - DNA, 609 bp, Kosakonia cowanii
  source 1..609: mol_type = genomic DNA
atggcagataaccagtcgtttatggcgtccattaatgcgttcgtcagccaggcaaaggagcgacaggaggaagtggtgcgcgtgatcggcatcaaaatcctggcgcggctggtgcagatgtcccctgtcggcaatccagagatgtgggcagtgaaccagacggcggcggcctataacgcggcggttgcagagcataacagtctactgcggcaaaacccggaaaaccttactaaagcagggcggctgcggccaggccgcaaagttaaggacggcatggatatcaaggcaccgcccggctacaccggggggcgctttcgcggtaactggcaggtgtcgtttgaccagcgcgccgttggcgagaccgggcgcatcgacaaggctggccacgagacgctcaccgcaggcaacctggtactggagcagttcaaagtcggtaccacggctatctatttctgtaataacgtcccgtacgcctaccgtctggagatgggacattccagccaggcgcccggcggcatggtgcgcatcaccgccgccgagttccagcggtacttcagcgaggcagtcagcgaggttaaaaatgataccggacatcacaacggcgcttga

SEQ ID NO: 535 - DNA, 483 bp, Kosakonia cowanii
  source 1..483: mol_type = genomic DNA
atgatcattaccgatatcacttcaccggccatgaacagctatgcaggcgagggggatttgaaagcctttgccgatctgcgcgatatcacgctgccggaaaagatcgcgccattgctcatccgggcgatggattaccttgaggggctggactgggctggctggcgaagcgaaccaaagcagccgctggcgtggccgcgcgcgggcatcgaactggacgggtacgaactgcccgccggagaggtaccgcgtctggttgttactgcgcaatgcatgctggcgatcgaggcgatggatggcgatctgctgggcagtgtgcgagaagcagctgtgaagtccgagcgcgtggagggagccgtaaccacgacttatgccgtcgctgacggcgaagtgttcagaccgtcttacccggcggtgatggctttgctcggcgagctggctggtggtcgtggctatgcagtaaacgcttttgcggagcgtgcgtaa

SEQ ID NO: 536 - DNA, 690 bp, Kosakonia cowanii
  source 1..690: mol_type = genomic DNA
atgaaccaagaactgtttcacgcagtgcagaaccgcgacggcgaaatgctggcgcgcatggctggcagcagccgcgaacaggccaaggtgatcaacagcgacgccgagcgcatggtggatctcctgttcagtcaactcaagcaggtctttccggcatccacgcagaccaacctgcgcagcgaagcggatgagcgcacggccaaacagcagtggatcgccacgttcgccgaaaatggcatccggagccgcgagcaactggtagccggaatgcagaaagcgcgtgccagcgtgtcaccgttctggccttcgccggggcagtttgtcgcctggtgccgtgaaggcaagggcctcctcggtatgagtccagcggatgtcatggccgaattctggaagtggcggaagctcgttttcaaataccccaccagcgagcaatacccgtggtcacagccactgctgtatcacgtttgcctggaactgcgccgccggggtgttgatcgccagatgaacgagaaagagctgctcagcgaagccgggcatctgcttgcgcactgggaaaagcgtgttgccgaaggtaagccgatcccacctgttcgccgcatgctggcagcgccgcatcaggaccgggggccgacacccgcagagatgctgatggccgagtataagtgccgccaggcgcaggggagggtttga

SEQ ID NO: 537 - DNA, 312 bp, Kosakonia cowanii
  source 1..312: mol_type = genomic DNA
atgaccactaaatttcagctccagcccaaaccgactttcaaagcagacgtcaccattccgcgcgccggcgaagatgatggcatacttacgtttaccttccgtcataaaccggtcaaagaacttgctgcactcgaagaaatcgagggaaaaactgctatcgacttcctgactgaaatcaccgagtcctgggcactaccggatgagttcagtcgtgaaaatctggagatgctcctggataactacccgggcgcgatgaaagcgatcgttggcacctattatcgggagttgacaggtaaccgcgaaaaaaactaa

SEQ ID NO: 538 - DNA, 411 bp, Kosakonia cowanii
  source 1..411: mol_type = genomic DNA
atgataccggacatcacaacggcgcttgaggccatgctgggtctgtgggcagacggcgagggcgtgcgggtggtgtgggataacattcagttcgatccgcctgacgacgggttgtatctgatctcccatgatatgcccgcgcagccatacagcattgatatggccgggggctgtcgcgtctaccccggcgtgtatcaggtcaccgtcgtcgcgccagcgggtggcggcaaatcacaggccagaatgctggcccgccgcgtcgccgggttgttcccggagaaccaagagattcccggcgatggctttaccgcctgggtgacatcaccgcccgccatttaccccggcataccggacggggtgtcctactccatccctgtcagcatcaactaccgggctgatatctcagcttga

SEQ ID NO: 539 - DNA, 351 bp, Kosakonia cowanii
  source 1..351: mol_type = genomic DNA
atgcctgttaactacactcgcatgaaagccaccagcacgcgcctgctcactgagaacggcgcggcgtacccggtaaagcgtaagggcacagtaacggtcatcggaggcgttgaacatcctgagccggataagactttcactgcgatcggcgtgcggactgagtatagacccggcgaaattgacggtacggtcatcataaacggcgatatgcgtattgtgtttactgctgataacgagctgcgcaccggtgacatggtggacgtggacggcaaatggtaccgcattgagaagcccaacccggtcaatcctggcaagctgctgttgtgctaccgcgctcagctgagggcatga

SEQ ID NO: 540 - DNA, 771 bp, Kosakonia cowanii
  source 1..771: mol_type = genomic DNA
atgttaatccgaaatatgctcctgaaatactacgcacctgaagatgatggccagggcggcgggggaggcggtaccgaaattacgccagaaattcagaagctgattgatgatcaggtcgctgcccaggtctccggcctgaaaaccaaaaactccgagctgctgggcaccatcaagcagcagaaagacaatctgtctcgctttgacggtatcgacccagatgcggtgcgcggcatcctgcagcgattttctgacgacgaagaggcaaagctgattgccgccgggaaaattgatgaggtgctggataaacgcaccgagcgcctgcgcgctgatgttgataagcagatcaaagcggccaatgaacgcgcggataaagccgaagcgttctccggcaaattccgggatcgcgttctcggcgatgccatccggtcggcagcgtcaaaagctggcgcactggcggaagcatccgatgacctgatcctgcgtgccaaaggcacattccagctcaacgacgaaggcgaggccgtagcagttgatgcaaatggcgacgttctgtttggtaaggacggcaaaaccccactaagcccgcttgaatgggcggagtcgcttaaggagacggccccgcacctgttcccgcgcgctgaaggtaccggcgcgggtggacacaagccaggcggtggtggcagtcagaaacgttcagagatgagcgccagcgataaggcggactatatccgcaagcatggccagcaggccttcctcaaacttccgaaataa

SEQ ID NO: 541 - DNA, 1407 bp, Kosakonia cowanii
  source 1..1407: mol_type = genomic DNA
atggctaataacgacataacctgggttcgtcctgaacaccgggcggccagtgctgcctggaagaaaatcagggacttttgcaaaggggcagaggcggtaaaagaaccgggcaataactatctgcctttgcttgactccacagacaagagcatgcgtaaccgcaagcgcaacgaagactacctgcagcgggcggtcttctatgcgattactggtaataccaagattggcctcctcgggctggcctttcgaaaggatccgaccttttccgcgccggagaaactgagctatctgctgaagaacgccgacggcgctggcaccagcatttaccagcagtcgcagctggtgaccgagaacgtgcttgaggtggcccgtgacgggctttatgtcgattacgctgagggcagtggccaagccattatcctgcgttatctggccgagaacatcatcaactggcgcacgaagcgcatcaacgggcgcgatcagttggtgctggtggtgttgagggaatgtgtggagcaggaggatggctacgcgttcaaggatgaggtccagtatcgcgagcttgcgcttgaagagggccggttcatctgccgggtgtggcgccgcagcgcggatgccggttccgctgcatacgttgttaccagtgaataccagccgaagcccaaaggcaaagacagctgggacgaaatcccgtttaccttcgtcggcgcgcagaacaacgatccgactatcgacgactcaccactcgccgcgctggtggagataaaccatggtcacttccggaacagtgctgattacgaagacagcgtgtggttctgcggccaggtccagccctacatgacgggacttgatgaaggatggcgcgatcatctggaaaagaagggggttaaaatcggctcccgctcgccgctgctgctgcccagagagggcaactttggttatgcccaggcgcaacccaacatgctggcgaaagaggcaatggacagtaagcgcgactacatggtgcagctgggtgcccggctcatcgagcagaacgcggcggttaaaaccgcaactcagtccagcagcgagcagacatcgtccacttctgtactggggatctgcgtctcgaacgtatcggaggcctattcactggccatcggctggtgcgcgaaatatctgggcgtcggcgagcagcaggcggcctacgcgatcaatcaggagttcattgctaaggtcgccgagtccggcatggttaccgccattgtgaacgcctggcagtccggtgcaatccgcgacactgatatgattcgtgcgctgcagaagcttgacctcatcaacccagcagacagccccgacgatatcattgacgaactgcacaaccccacccccaccctgattggcggtaacaatggcaacggtaaatga

SEQ ID NO: 542 - DNA, 1311 bp, Kosakonia cowanii
  source 1..1311: mol_type = genomic DNA
atgacggggatatcgccgacccttaacgtaccgcaggcacagtttctggctatgccgcataagttcaaggcctatgtggcaggcttcggctccggtaaaacatgggtgggctgcgggggcatctgcaaggggatgtgggaacatcccaaaatcaaccaaggctacttcgctccgacctatccgcaaatccgcgacatcttctacccgacgatggaagaggtggcattcgactggggccttaaggtccagatcaacgagagcaacaaagaggtccatttctacgccgggaggcagtaccgcggcaccaccatctgccgctcaatggagaaacctgccacgatagtcggctttaaaatcggcaacgcgctggtggatgagctcgacgttatgcccgccctcaaagcgcagcaggcctggcggaaaatcatcgcccgtatgcgctataaggtcgctggactgcgtaacggcattgacgttaccaccacaccggaagggtataagtttgtttatcagcagtttgttaaggcagtgcgcgataagcctgaactggcaaccctgtacggacttgtgcaggcttccacgtttgataatgaagcgaacctgcctgatgactatattccctcgctgctggcgagctatccaccagagctgataaaagcctacctgcgcgggcatttcactaacctgacaagcggcaccatttaccaccagttcgatcgcaggctgaacaactgcacagatgaagagcagcagggcgagccgctgtttatcggcatggacttcaacgtcggtaagatggcagccatcgttcatgtgaagcgtgaagggttgccgcgcgcggtgcgggagttggtgaaggtctatgacactccggcgatgatcaaacgcattcaggaagagttctggcgctatgagggcggccgctacgtcgccagccgccagatctacatatatccggatgcctccggcgacagccgcaaatccaactgcgccagcctgaccgatattgcccagcttagagaagcggggttcagcgtcatggttaacgcttccaatccgccggtgaaagatcgtatcaactcgatgaacgccatgttctgtaatgcgctgggcgaacggcgttacctggttaatgtccagcgctgcccggtctatacggaaagtcttgagcagcaggtatgggataaaaacggcgagccggacaaaaaggcagataacgatcaccccaacgatggtggcgggtatttcattgtgaaggattaccccatcgtcaaacctgcatactcaatcactatggataccaccttctga

SEQ ID NO: 543 - DNA, 933 bp, Kosakonia cowanii
  source 1..933: mol_type = genomic DNA
atggagaaccagaagaccggtttcatcccgttgtaccggagtgtactgaagcagtcctgggcgaaggacgtatatcttcgcaccctgtgggaaaacctgcttcttactgctgcgagacagccctatacggctaactttaagggccgtcagtggccattgcagaccggacaactggtgaccaccacagccgatctggggctggatttatgcgaccggaacggggaacccaccagccgtcatgcagtggagcgtatgcttgggctttttgaacgggaagggatgatcaccaccgccggggaacgccggaaaggcactgtaatcaccatcacaaactatgcgctttatgctcaaaaaatggacgatttgcccgcgcataacgccacgcataacagcgagcataactccgcgcataacgaacccagtaacggcgcggcttcagagggtgatgccgcgcataacagcgagcataagggcgcgcttaagcccgcgcatcatgaacaagaagtaatattaaatactaacgtatttaatgatcgtcagaaaaaatccaaatctcttcctgatgctgcagttcggaccccggctggtgacaagtggggcacgactgaagatctgcagtgtgctgagtggatgctcgcgctacgcaacctaacaaaaccttcactgaagaaaccgaacctgaccacctgggcaaatgacatccgcatgctgcgccagctcgacggccgcacgcatcgtgagatctgtcagctgttcaagtgggctgcgcaggattcgttctggcacaaaaacattctctcgcccgcgaagctgcgtaagcagtgggacaccttggtgctgcaccgtgaggatcgaaaccgtaagcctgtcaacgaaaccccggccagtgacgcgcactggaacagccctgaagcctggaaggatttcatatga

SEQ ID NO: 544 - DNA, 954 bp, Kosakonia cowanii
  source 1..954: mol_type = genomic DNA
atggctacaactgttaataacgatctggtcatctatgacgatctggcgcagaccgctttcctcgagcgccgccaggacaatctggaagtgttcaacacttcctccaacggcgcgatcctgctggataatgagctcattgaaggcgacttccgcaagcgcgccttctacaaagtaggtggctccatcgaatcacgtgatgtgagctccaccggcaaggtgaatggtaaaaaaatcggtgccggtgaggcggtgtctgttaaggcaccgtggaaatacggtccgtacgaaaccactgaggaagcctttaaacgccgtggccgcacggttgacgagttctccgaagtgattggcgttgatgtggctgacgctaccctggaaggctacgtgaaatatggcctgaaggcgctgacggcggcaatcggagcaaacaccgatatggtggtgaccgccgatatcgaaaccgacgggaagaaaaccctgacgcgcggcctgcgcaaatacggtgacaaattcaaccgcgtagtgctgttcgttatgcactccgccacctacttcgacattgtggacgaggcgatcgccagcaagatatacgaagaagcgggcgtggtggtgtacggcggccagccgggtaccttgggtaagcccgtgctggtgaccgataccatggatgccgccgctattcttgggctggtggccggtgcggtgaccgtgactgaatcccaggcgccgggcttccgctcctacgacatcaacgatcaggaaaaccttgcggtcggctatcgcgcggaaggtacagtcaacgttgagttgctgggctacagctgggacacggccaaaggcgagaacccggatctgaccgccattggcacggccggtaactggaaaaagcatttcacaagcaacaagtccactgcgggtgtgctgatcaagctgggggccgcatcgggggagtaa

SEQ ID NO: 545 - DNA, 597 bp, Kosakonia cowanii
  source 1..597: mol_type = genomic DNA
atggcgcagttacaactcattaagcattcttccaatatcctgatccccgccacgccggagaccagcgatttcctgcaatcaaaatgtaagctcggcaccgtgctggtggccgatttcaaacaagtccgcaacccggcctttcaccgtcgtttcttcgctctgttgaatctcggcttcgaatactgggagcccactggcggggcgatctcctcaaatgaacgcaggttggttaccggctatgccaaatacctggcaatgttcggtgggagcgaaaccgcgctgctggatgctgctgagcagtacctcgatcgtatcgccgataagcgcacgggcagcatcagcgcctgcaaatccttcgacgcctatcgtgcctgggtgactatcgagtccgggcactatgatgccatccagctgcctgacggaaccctccggaaacatccccgcagcatcgccttcgccaatatggacgaaaccgagtttcagcagctctacaaagctgcgctcgatgttctgtggcgctggatcctgtccaaggcattcagagaccagcgcgaggctgagaacgctgccgcgcagctgctgagcttcgggggctga

SEQ ID NO: 546 - DNA, 1086 bp, Kosakonia cowanii
  source 1..1086: mol_type = genomic DNA
atggcaacggtaaatgaaacgttacgtgacgaagccatagcccacaccgtctggatcagccgttatagcactggtgtggcaaaccgcatggttaagctgctgaacgacagcgacgctgagcttaccgcacggctgctgttggcgatggacagcctgcccaccagccagtttacggtcaggcgactggaaagcatgctggggagcgtacgcgagcttaaccagcaggcaatagcgggcatgcagaccagcctgacggatgagctcctgctgctggccgggcatgaagcaggctatcaactgagcctgtttgattcgctgctgccgcagcgggtgaaagagcggtacccgctgcagagcatcacgcctgaacagctgtacgcggccgccatggcccagccctttcagggacgtctgttgagcgaatgggccgataaccttgaagccgaccgcatggcacgcgttgttaatgcagtgcgtcgcggctacctgcagggtgataccacggagaccattgcccggcaggttcgcgggatcgccagcaaaggctataaggacggggcgctgcagctcagccggaccaatgccgccagcattaccaaaacggctgtgaatcacctggcagccacggcgcggactaattttgcagaagccaatggcgatgtactgaaaggtaaacagtggctctccaccctggacaataaaaccacgccgacgtgcatcatccgtgatcgcctccgttacactctggacaacaaacctgtcggtcacaaggttccgtatctgcaggggccggggaaaatccatttctgctgccgttccacggagacgctgattaccaaatcatggcgtgagcttgggatcgacagtaacgagctggatgaagatacacgcgccagcatggacgggcaggtgccagcggataccacatatcttgactggctggcccggcagtcgctgccgcgacaggatgagatcctcgggccggagcgggccgcgctttaccgcgctggcgagctgaagctcggggaaatgttcacagacaagggggaatggataagcctggcccgccttaaagcgctcagttaa

SEQ ID NO: 547 - DNA, 384 bp, Kosakonia cowanii
  source 1..384: mol_type = genomic DNA
atgagaaaagaagaacctaacctcgtactggttgaacgccttactgagatcactgatcgcggcgttaccaaagcagacatggcacgcatagctggagtcacccctcaggccgtaaacggctggttcaaaaaaggcgtgattagtaagaaatcagcgctggccatagccgacgctgttggcatttctatcgcttggctactcggtgaggacgttggtgagaaagacggcctgaagccggacgaacagcgcctgctggagctttaccgccagctgcctgaagaagagcaacagaacatgctccgcattttcgcgattcgcctgaaggagctggacgaactgtatgagcgatacatgaaggggcggattcgctcgcacggagattga

SEQ ID NO: 548 - DNA, 564 bp, Kosakonia cowanii
  source 1..564: mol_type = genomic DNA
atgcaaacactaggttttcatgatgatagcagggggctgtccgctccgctgagatcgaattatcaaggcgttccgcgcaacaattgcaagcttaaccagattcgggaagcggttaaggcctggaaccgggctacgcccggctctgctcaaatacatatctctcaactggtggcgaaggagtggatggcgcgcggcggccgcggcctgttgctggccggttctgagcacaacactaggcagaatttttttcggatgattaacgatccaggtccgaagaacgacaaaaacctgctgcagcttatcccgatcatcatcgatgtgatggcgagtgataacgagcaggtagcgcgccggtttgggctaatcagcggaaaaacaaaggccgagcttattgctgaagcgatgaaagagtgcgccgaagcaaaacaggccgttctgctcagcttaccagaacatcagaagctgaaagaggtgagcgagggtattgcgtcgctattccggctaatgccagagcagacagggacactaatgacaattgtcacttcaatgctgggggcagtatga

SEQ ID NO: 549 - DNA, 354 bp, Kosakonia cowanii
  source 1..354: mol_type = genomic DNA
atgagtgaatcacttaacaacaaagagctgatcgcggttggccatgagtttgcgaaggcaatgaccagcgacacgccgatcatcgaaatcgcaaaaatgatgtctcgcctggccgagcggctagattgcactacggctgcgctgcgcgaaacggctaaacagcgtgatgcgctggcggccctgcagcagcaagatatcaccaaggtgctggatgaatgctctgaatatctcgacagggactgcatcatggagacgaacggcattagctacgaagttgctgctcaacgagaagtaggtgcaaaggctcttcatgatgcgttgatggatcttagccgaaaggagcttactgcatga

SEQ ID NO: 550 - DNA, 804 bp, Kosakonia cowanii
  source 1..804: mol_type = genomic DNA
atgaaacttgaatcttcactaaaacacttcagccctcaggggatgaacatcagcgacagcgttaaaggcacctctcctgacaggctgaccggtacagatgtaatggcagcgattggcacaaccagcagccgcgcgcgcttcggtcttgctgcgttcttcgggaaagcagggatcagcaaaacggatgagcagctcgcagtacaggcgctggcacgatacgcgatggacgtcgccccgaagaatgtgcgtaaagcagctggtggcgagtttggttggtgcatgcaggtgctggcgcagtttgcctttgctgagtatgcccgttcggcagccagcagcagcacctgcaccacctgcagcggtacgggttttttctcccggattgaggatgtgatcaaacatccgggtattttcgatgctgacggtgtcgagctggttgccccgaagattaagcatgagcaggtaaaacatgcatgcacagcctgtggcggtaagggcatcattcctgcgcgctgccgctgcggcgggaagggggaagtactcgatcgagtggcgacgaaagagcggggcgcgccggtattcaaaacctgtgagcgatgctccggcattggcttctcttcagtgccatcaacggctgcacacaaggcaatcattcggcgcctgccggatctgcatgtcagaacatggacccgcaactggaagccatttattgaatcgctggtggagatttgtaagcaggaagaggccaaagctgaaaaagaattccagtctgcaaccaaatatcacgacgaagacaacataatttag

SEQ ID NO: 551 - DNA, 360 bp, Kosakonia cowanii
  source 1..360: mol_type = genomic DNA
atgaaacgtatgccggacaaagacgctggtttctgggcaggtcttatagcctggctatacagccataaaacagaatggggatatgcgggcgtagcgggcatgttttctctactgcgcagcgcctatgcacagtcctcatggagtaagcgtgttctcgacgctgtatcgtgcagcgcgctggcattcttcgccgcgccgacgcttcaggttgtcggtggtgttcttaactggaacgtgcctgatacagccgctcaggtgtttgcggtttacatcgggtatgtcggcaatgactacataagcgagaagctgcgcgggtggattagccgcaaaacgggagataacagtgaaaatcagtcctga

SEQ ID NO: 552 - DNA, 612 bp, Kosakonia cowanii
  source 1..612: mol_type = genomic DNA
atggctaagaaaccccgtcgtaaatgcgcaaacctgagctgtcgccagtggttcaacccgatccgcgaagggcaggtggtttgcagcttcgagtgcgccagcgccatcggcaaagaactgacagcaaaagcccgtgaagccgctaagcagaaggaactacagcggcagcgtgctgaagagaaggctggccgtcagcggcgcgcggcacgtcgtaaggagctgaagccgatccgtcactgggtgcagatgactcagcgtgcattcaatgactggcggcgcgaaatgctgctgaccgccgggcacggatgcatctcttgcggtaccaaaaccgcttttgcctggcatgccgggcattaccgcaccacggccgccgcaccgcaacttcggtttaatccggacaatatatggctccagtgctccgcctgcaacgtccacaaatcaggcaacatcgaggcataccgcgccgctctcgtcgagctgatcggcgaaaagcgcgtgctggcgctcgagtccaacaatgaaacccaccgatacacccgggaagaactggacggcatccgcgccagggccagggcagatcttcgagtactgaaacagcaggagactgcatga

SEQ ID NO: 553 - DNA, 264 bp, Kosakonia cowanii
  source 1..264: mol_type = genomic DNA
ttgatagcaaagaagggggtttttgtgaaagaaagtcaggtccaaggcgactggtacgatattgtcaggcgttcagatggcaagcttgtcgggtcaatgccgctcgaaagccgcaacctcgtctacatcaaaaatggcatggtttcatgtcgccctttgatggaggatgaaggtattttcaatctgtcgtccggaacacgttttcttcgccgcctcggctaccgcctcgaacaaccctctgatatgatgatatcaacggactga

SEQ ID NO: 554 - DNA, 324 bp, Kosakonia cowanii
  source 1..324: mol_type = genomic DNA
gtgtgcaaccgcttaaaaccaaagcaaaaggccatcgtggagttcatcgagacaaacggaccggcaacgccccgtcagatccgtaagctgctcggctgcgacatccgtgaggcctacgatcgtctcaagcgcctgggtatggccgggatcgtcaaaaatatcggcaaaccgaagcatccggaataccagctggtgcagcgctggcaggaaaaaatcaagcagccgaagcagcggctaccagcagcgccatccgccgccgatgtctgccgccagaactggcagggctacgaaattcataaaatttttgggagtgcgcgggcatga

SEQ ID NO: 555 - DNA, 348 bp, Kosakonia cowanii
  source 1..348: mol_type = genomic DNA
atgaaccttcctgaatctgtcgggccggtgccggttgtccgcacacctgacggctactggtgccaccccgcactgactgcattttaccgtgaccgggactgtgtcccgcaggctgaatatgaccactggctggcggacaacggcctggaggacacgctggtctgtctggataccgatgatgacacgccggcggcgcaggcatatgcccgcaatgccgatatttcatactggacgccgcccgtacccgcaggtgagggctggtttaccggcgcgatattcgacgacgaggattacggtcccgcctgtatctggctgcgccggcgggaggtgccatgcgacgcaggctga

SEQ ID NO: 556 - DNA, 489 bp, Kosakonia cowanii
  source 1..489: mol_type = genomic DNA
atgacacgaattggcattcttggagtaaatgatctgactgaaaccattctggtcgaattgttccgtcttgatccttgcgctcatgtttttctttcatccggggagcatgagcgcgcaaacctgctggcaaggaagtttccgtgctggattcaggatgacgttcaggcggtaattaacgaagcagatatcattatcattacgacaggaacatattcctctgaaaacccaccggaaaaaatcgagtatcgaaaatcacaattaatcttttttttggaagcatggccatcaataaacagtcaggtgttttcaccctatccggataaaaaaataaattttacaaccagacatgtagcactggctaatatttcgccatttattcatctaacagaaatacagattgatgactatctttttattcttaaagtcctgttggttgcaatgaaacccgtgcatacacttgatgtcaatttcagatcgtcatctgaataa

SEQ ID NO: 557 - DNA, 114 bp, Kosakonia cowanii
  source 1..114: mol_type = genomic DNA
atggtgaaagccgcgctggtgagacagcaacggctttcgggtgcaattaccgacagcaactgcgaggtcattatgacaaacgctcatttaaaacaccaggcgaaaggggcatag

SEQ ID NO: 558 - DNA, 348 bp, Kosakonia cowanii
  source 1..348: mol_type = genomic DNA
atgaaccttcctgaatctgtcgggccggtgccggttgtccgcacacctgacggctactggtgccaccccgcactgactgcattttaccgtgaccgggactgcgtcccgcaggctgaatatgaccactggctggtcagcaatggcctggaggacaccctggtctgtctggataccgatgatgacacgccggcggcgcaggcatatgcccgcaacgccgatatttcatactggacgccgcccgtacctgcaggtgagggctggtttaccggcgcgatattcgacgacgaggattacggtcccgcctgtatctggctgcgccggcgggaggtgccatgcgacgcaggctga

SEQ ID NO: 559 - DNA, 1110 bp, Kosakonia cowanii
  source 1..1110: mol_type = genomic DNA
atgttcaggctcaaacctgccacttttgctgtttgcctgttgccgtttgcacttgtggcctgcggcgacgcttcagataacagtgatccccgcagcctgccccccctggtcaggtctgccgcagcgatcaacgcaacccattcttcccgcgcttttacaggggtggtggttgcacgtatccagagtgaccttggtttcagggtacaaggcaaaatcctggaacgtctcgttgataccggtcaggccgtgaaacgaggccagccgttaatgcgtctggaccctgtggatctgagcctgcaggctcaggctcagcaccaggctgtcgctgcagcaaaagcacgcgcccgacagacagcagacgacgaatcgcgatatcgcggtctggtcactaccggagctgtatcggcatccgcttacgatcagattaaagccgcggcagatacggccagggctgatctcagcgccgcccaggcgcaggcgaatgtggcgcaaaacgccatgagctacgcagtcctggtggctgatgatgacggggtggtgatggatacgctggccgaacctggtcaggtggtcagtgccggacaaccggtaatcaggcttgccagagccgggcagcgtgaggcggtcgtccagttacctgagacgctacgtccgtccccaggaagcacggcacaggcttctctgtacggcagcgataaacagcctgtttccgcgacactgcggttactctcggatgccgccgatccgttgacgcgcacgttcgaggcacggtatgtgctgaacggcccgttgtctggtgccccactggggtccactgtcaccattcatattgcgcagggcagaacatcgcagccgttgctgcaggtgcctttagccgccgtttttgatgcgggtaaaggcccgggtgtctggagcatttctggaaaccccgccagagtggcatggcgtccagtacaggtcgtcagcctcggggatgatgcggcaagcgtgaccggcagccttaagcctggcgaacaggtcgtggcgctgggggctcatctgctgcatgacggtgagacagtccggctggcgaagcagagcgatgtcagtgtcgccgggagccagccatga

SEQ ID NO: 560 - DNA, 1467 bp, Kosakonia cowanii
  source 1..1467: mol_type = genomic DNA
atgtttcccctaaacacgcttgcagtggtggtgggtgcctgcatcctgacgggttgtgccgtcggaccggactattatcgtcctgaggtacccattgcgaagcattaccacgctcaacaggctttacagcagcccactacatccgaatccgccaatttttcaatctggtgggaaaactttggcgatccgctgttaagtcggttcgtttcagatgcacttacgcaaaatcttgacctcgcccaggcatccgccaggatgatgcaggcacaagccgggctgggagcggcaacggcggcgctgcttccctcgggaaatatcagcgggcaagctgcacgtacgtatcagtcggttgaaacaccgttgggtcaggtgcttagttcaacgccggattataatcgctacggcaattcgtatgaaatggatctcaatgcaggctgggagatagacctgtttggtggcctgagacgaggtcgtcaggctgccctggccgattatcaggcttctcaggccggtgtagcggcgacacgcctcgctgtcgcagcacagactgcagatatctatatcaccctgcgtggattacagtcccgtctggatattgcgaataaacaggtcattacacaacagcaactgctggaaaaagttcagctgttgtacagcaaagggctggcatcagaatatcaggttcgtcagacagaaggcgcactggcacaggtgaaggcaacggtaccggttctgaacaacggacttgatgccgccatgaatgcgctggacgtcatgctgggcgcgcctccggggacgcatcatgcgcaactggcttcaccgggggctattcctcatacacccgcaatcacctcaatgggcaccccggcggacctgcttcgccgcaggcccgatattattgtggccgagcgtcatctggccgcttcaagcgcccgtatcggtgtggctgtcagcgagtattatccaaagttttcccttaatgctctgcttggcagcgcaacggcagtatcaggcgataatcttttcactgccggagccagccagtcggcaggtgtgctggggttacgctggcggctttttgactttggccgtattaacgcccagataaagcaggcaaagggccaggaagctgaggctctcgcggcttatcgtctgtcagtcttgcgcgcagcagaagacgtagaaaacgcattctcggcactggtcaatcgccagacgcaggcagccacactgacgagcggcgaaaccgccctggccagcgcccgacagtcttctttcgtggcttttcagcaaggtacagccagtctgattgacgtactgcataacgatgaaacgcttctccaggcctcggatgcaagagcgcaggcgcagacagaagctgcccatgcagccgtggcagcattcagggcgctgggcggtggctggcaatctacattgtctgaagaaatagcaaatacgccgggataa

SEQ ID NO: 561 - DNA, 615 bp, Kosakonia cowanii
  source 1..615: mol_type = genomic DNA
atgactaaacagataaacgatacccccacgcgggggccttccgaccatagtgtccgtgatcaggttgttgacgcagccactgagcatttcggccactacggctacgaaaaaaccacggtctccgatctcgccaaagcgatcggtttttcaaaggcttatatctataagttttttgattctaaacaggcaatcggcgaagttatctgctcaaaccggctggcgatgatcatggaaattgttaatgctgcgattgcggatgcgccgacagctgctgagaaaattcggcgattattcagaggattatcagaatccggcagcgatttgttttttcgtgaccgtaagttgtacgacatcgcggccgttgcggcacgtgataactggccttcagcgcaagcgcatgagcaacgtctgcgtcagcttattgaacagatcattgttgaagggcgtgaggctggtgagtttgaaagaaaaactccccttgacgagactgctgatgcgatttttatggtcatgcgaccttatatcagcccggtgcagctgcaatataatctggaaactgccccggccgcagccgtattactgccctccctgatcctgagaagtttgtccccatga

SEQ ID NO: 562 - DNA, 3111 bp, Kosakonia cowanii
  source 1..3111: mol_type = genomic DNA
atgagtagtggacgtttcaatctttccgcgctcgctgtgcgtgagcgttcagttacgctgtttcttatcctgttaatcaccgttgccggcattctctcgttccttggactggggcgcgcagaagacccaccctttacggttaagcagatgaccatcatttccgcctggcccggagccacagctcaggaaatgcaggaccaggtggccgaaccgctggagaagcgtctccaggaactcaagtggtatgaccgcaccgagacctacacgcgccccggcctggcttttaccatgctctcgttgcaggacagtactccaccttcagaggtccaggaagagttctatcaggcacgtaaaaaactcagcgatgaatcaaggaacctcccagccggggtaattggtccgatggtcaacgatgagttctcggatgtcacgtttgcgctctttgcgctgaaagcaaaaggagagccacagcggctactggttcgtgatgccgaatcattacgccagcgcttattgcatgtacccggggtgaaaaaggtcaatattatcggcgagcaggccgagcggatttttgtctcattttctcatgaccgtctggcaacactgggtatctcaccgcaggatatctttgcagccctgaacaaccagaacgtgctgacgcctgccggttcaataaacactcgtggtccgcaggtttttatccgtctggatggggcgtttgacaagctggagaaaattcgtgaaacgcctgttgtatcacagggaaggacgctgaagctttctgatgtcgcgacagttgagcgtggctacgaagatccggcgacctttatggtacgtaaccagagtgagcctgcgctgttgctgggtattgtgatgcgtgagggctggaatggtctggatctgggtaaagcgctggataaggaagccgccagcatcaatgcggatatgcctctcggcatgacctttacgaaagtcaccgatcagtccgttaacatcagctccgccgttgatgagttcatgatcaagttttttgtggcgctgctggtcgtgatggtggtctgctttctcagcatgggctggcgcgtgggcgtggttgtcgctgcggctgtgccactgacactggctgtcgtctttgtgatcatggaagcgtcaggtaaaaacttcgaccgtattaccctgggttcgcttatcctcgcgctgggattactggtggatgatgcgatcattgccattgaaatgatggtggtgaagatggaagagggttacgaccgaataaaagcctcggcgtatgcctggagccacaccgccgcgcctatgctggccggtacgctggtcacggccgtcggctttatgcccaacggttttgcacaatccacggcgggtgaatacaccagcaatatgttctggattgtgggaattgccttaatcgcctcctgggttgtggcagtggtctttacgccgtatctcggggtgaaaatgctgccagatatcaaaacggttgaagggggacatgatgctatctacaacacccgacgctacaaccgttttcgtcagttactgacgcgggtgatcgcacgaaaatggctggtcgcgggttcagtcgtcgcggtgttcaccgttgccgttctcggcatggcactggtgaaaaaacagtttttcccgacgtctgatcgaccagaagttcttgtggaagtgcagatgccgtacggcacctctattgaacaaaccagcgccgccgtaacgaaaattgaggactggctcaggcaccagaaagaggcaaaaatcgtgacggcttatatcgggcagggttcaccacgtttctacctcgccatggcgccggaactgcccgatccctcttttgcgaaaattgttgtcctgaccgacagccaggaagcccgtgaggcgctcaagtttcgtcttcgccaggctgcggctgacgggctggcaccggaggcacgtgttcgcgtgacccagctggtatttggcccgtattcaccctatccggttgcctttcgtgtgacagggccggatccgacggttttacgggacattgcagataaggtaaaaacgctgatgcaggccagtccgttgatgagaacggtcaacacggactggggatcacgcgtgccgacacttcatttcaatctgaatcaggatcggctgcaggcggtggggctgacgtcaaacgcggtggcccagcagcttcagttcctgctttcgggcgtaccggtcaccgctgtacgtgaagatatccgttcagtgcaggtcatgggacgtgctgccggcgatatcaggcttgatccagcgaaaatagctgactttaccctggttggttccgcagggcagcgtatccccttatcgcaggctggcgaggtcgaagtgcgcatggaagatcctgttctgcgccgtcgtgatcggatgccaaccattaccgttcggggtgatattgctgaatcccggcagccgccggatgtctccactgcaattatgaagcaactgcagcccatcatcacaacgctgccggatggataccgtattgatgaagctggctcgattgaggagtcagggaaagccaccaaagcgatggtacccttattcccaatcatgatagccatgacactgctgattattatcctccaggtacgctcgatgtcagcgatggtgatggtctttatgactgcgccactgggactggtaggcgtggtgcctaccctgctgctctttaaccagccttttggcatcaatgcgctggttggcctgattgctttgtcaggaatcctaatgcgtaacacgctgatcctgatcggccagattcaccataacgagcaggaaggacttgcgccctttcatgcagtcattgaggcaacggtacaacgttccagacccgtgctgctcacggcgatggcggccattctggcctttatcccgttaacacattcggtgttctggggaacccttgcctacaccctgataggcgggacactgggtgggaccattattactctggtgttcctgccggctatgtatgccatctggttccggatcaagaggccggattcaacctcgtcaacggaaaaacatttcagctcagaaggattaaaaaatgtctga

SEQ ID NO: 563 - DNA, 348 bp, Kosakonia cowanii
  source 1..348: mol_type = genomic DNA
atgaaccttcctgaatctgtcgggccggtgccggttgtccgcacacctgacggctactggtgccaccccgcactgactgcattttaccgtgaccgggactgtgtcccgcaggctgaatatgaccactggctggtcagcaatggcctggaggacaccctggtctgtctggataccgatgatgacacgccggcggcgcaggcatatgcccgcaacgccgatatttcatactggacgccgcccgtacctgcaggtgagggctggtttaccggcgcgatattcgacgacgaggattacggtcccgcctgtatctggctgcgccggcgggaggtgccatgcgacgcaggctga

SEQ ID NO: 564 - DNA, 1131 bp, Kosakonia cowanii
  source 1..1131: mol_type = genomic DNA
atggctgccagaccccgtaaaaataatgtaagcgtaccgaatttatatccgctgtatagccggaaggtcaataaagtttactggcgttataaacaccctattacgggtaaatttcatgcactaggtacagatgaagcagaggctatagcgattgctactgaggctaatactagactcgcagaacagcgttctcggcaaatcatagcgatcagcgacaaaatcgcgaccagcaaaggtaaggctataaccacaaacacctggctcgaccgttactggaagatccatggtgaaagactggatagtggcgatattaagctcaacacctataagcaaaaggctaagccagtagctttgcttcgtgagcgggtaagtatgaagctgatttcgtcggtagatgtgcgagatatagctgaaatactggaagcctacatttcagatggacaaccgagaatggcgcaggtcatccgctcagttttaatcgatgtatttaaagaagctcaacactatggggaggttccccctgggtacaatcctgctcttgcaacaaagcagccgcgccggcgcataacacggcaacgccttaatctggaagaatggcagaaaattttcgatattgccgatgcaaaccataagtatatgggtaatgctatgttgttagcccttgttactggtcagcgtttgggggatatctcaaacatgaaattcagcgatatttgggatgaccatattcacattgtccaggagaaaactggaagtaagatcgccattcccctcgcgctaagactaaatgcaattaactggagcttacgtgaagtggttgctcgatgccgggattatgcagttagcccatatctggttcattttttccgcgccacttcccaggctgaacgcggggctcaagtgaaatcgaacaccattacaatgaatttcagtaaggcccgtgataaagcagaaataaattggggggatggcacaccagctactttccatgaacaacgatctttagcagagcgtctatatgaagcacagggtattgatacccagaaactgctggggcataaatcgcctaatcagactgcacgttatcatgatgatcgagggaaggagtgggtggttatcttccaaaaatga

SEQ ID NO: 565 - DNA, 510 bp, Kosakonia cowanii
  source 1..510: mol_type = genomic DNA
atggcaaagctcaccgacaaacaagagctgtttgcccgtgagttcatcaaagacctcaacgccactcaggcggccattagggcgggatacagcgagaagacggcccgggccattggttgcgagaaccttacaaagcctgacatccagctgcgtatcgcagagcttaatcaggagcggatggagcgcgttcaaatcgacgccgattacgtcctgcgtcaggcagtaaagctccatgagcgttgcatgcaggaagtggaacctatcactgatcgtcgtggcgaagaggttacggacgagcagggcagaacggtctacggcttcgacgccaagggagcggcagctgcgctcaaacttgttggcgagcacatcaccgttcaggcgtttaagaccaatgtaaaagctgagcacgttggcaaagatggcaaaccgattgaggttgtgaactattcccccgccgattataaggcagcccagtctcagcttgaggggaaactaaccggcctggactga

SEQ ID NO: 566 - DNA, 852 bp, Kosakonia cowanii
  source 1..852: mol_type = genomic DNA
atgcgaatgaatgccaaagagctgatcgccgaagccagagtgacagcccctactctgccaccagcagcagcaacgttaatgaacgctatagccgaccgcctcgatgttcagttcgtggtgctgtgcgaatcgcgtaacgaggcgaatcagctggcgggagaaaatgctctgatgaagtcggctattaagactcacagcgagtcagtccacttctgcgtgggttgtggcaaagatgatccatgcagcaatgatgatgtctgctatgccctcgaagaatctactgccacggacgcctttctcacctcgctgcacgcagaaggtgttgaaatgctggccgcagaagctgaaaagctgatggatgattttggtgatgacagctacaaagtgatggtcaccgcagatttacaacgtttcgccaaggcattcgccgcacagctccgctgtaaatcagtttctccagccggagtggaccagtcacccgcctccccagcaatcacaccacttccagttgagcgcaatcagtatggctactggactcacccggtgtatgaagaattctgtgacggtcgcgagtatatctccaacgaagatttcaacgtctggatgaaggataacgggctcgaatggaaagttgactatcgggatgaagaagctctcgacccggaagttgatggctatgacctctcgacgtggcagccagaagcgccagcgggtgaaggctggttcgttggttccattcacgatacagacgatggttcagtttgcatctggcttcgcaataaaaccgaaccatcccccaagaccgtagctatcgcgcgccagtttgaacagttgaaggaggctgaaaagtga

SEQ ID NO: 567 - DNA, 1464 bp, Kosakonia cowanii
  source 1..1464: mol_type = genomic DNA
atgatttatacaaccggttcaatcgcagtcagcggtaacacgctgaccggtacaggcacaaacttcactgccgcaggctctctcattcgtaacggctgcacggtgctggcgctgaccagcccggcgcaggctttccagatcacctcagtcgacagcgcgaccggcctcacagtgaccccggcggccagccctgcggttcccgccggcacgaagttcgccatcctgctgagcgacagcctgagcgtggatggcctggcacaggatatcgctgaaacgttcagtatgtaccagcggtacatgggcggctttgctgacgtgatgagcagcaacggagatgtgaccatcaccattaatggtcagcccattaccgtgcctggtcagcaatcgctggcgaagaagggggctaactcagacataaccagcctgaacggaatgaccaccgcactcagtatccagcagggtggtacgggaggaaaaactgcagcagaagcccggaataaaattggcgccgcgagctccggaaataacagcgatatcaccagtattacggggctgaccaccgcacttggcatccagcagggtggtacagcaggaaaaacggcagcagaagcgcggactaaccttgggttgagtgatgtcgcgacgaaaaccgccggtacagccgaaggttcagtcatgctggtgggggccatgggtacgccgacaggggggtataaattttacaaaaccgaaggtgccattgctccgacgctcaactggaacgacatcacactgcccgggctttttccaaaccttatcgatgcatcgaactcagcaaactcgccgacggcaagcggctactactacgcgcaggtttttgtgcggggggattccggggcggttcagcaaattgcactgccttacgccacatctgggtcaaacccggggcgcattctgtatcgcggtaaaaacggtaacacctggtcatcctgggctgaattttacaccacagcaaacaccaccaaagccagcgacggaacagtcaaggcggcttcgcccattgcacgtattgcagcggacagaaaaacctgtctccggactgatatctctgatgatgggttcgtgtggtgcggttgcggtacagcaaatggtgaggctgaaggcatcactatttcgcggctcgatactggtgtttatgttatcaccggttctgcagggctggcatcttctggctggcaacttttaccaccccgcgatccactgggttcaggtgatctgggtattgttgaggctgaggagactgaaagcgggggactgactatccggctgtataaacggcgttacgttctttcagaagacggggacattgagttacagaagggggctgcgattgatgtaccgcccaccagctggatcgatgtccgtcttgatatgccagaaacaagtctctggaatcagcgcgctgctggcactcaggagcaataa

SEQ ID NO: 568 - DNA, 1260 bp, Kosakonia cowanii
  source 1..1260: mol_type = genomic DNA
atgatttacacaactggctctattgcagtcagcggcaacacgctgaccggcaccggcacgaatttcaccgcagcaggctccctcattcgtaacggctgcacggtgctggcactgaccagcccggcgcaggcctttcaaatctcctcagtagacagcgctaccagcctgaccgtgtcacctgcggcatcagtacctgccggtacaaaatttgccatcctgctgagcgacagcctgagcgtggatggccttgctcaggatatcgccgagacgttcagcatgtaccagcggtacatgggcggctttgctgacgtgatgaacggcagcggagatgtgaccattaccatcaacggtcagcctgttaccgtgcccggtcagaaatcgctggcgaagaagggggctaacgccgacataaccagcctgaacggactgacaacagcgatcacacttgctcagggcggtaccggcgcaaagacggcagcaggagcacgcaccagtctggggctgggaagtatggccacccagagttctgacgcggtaaacataactggtggatccgggacattcaccagccttagctctgacgcggtgaccatcaccggtggaacagcttctcttggcactatcgagacaaaagcgggtgcggagcagccactggtaatacgcaccgctccgagtgggcttggctatatacgtttcagggatgcgtctgaaaatccactggcttatctgggattcggagcgagtggtgcccagcactttattctggcgagcaacatcggagtaaatagcgtcacgctgaatactaccggcgctgtgacagtaaaagcagggggcgctaactacgctttccagacaaacggaaccgctacggggcagctgtggcagagcacatccgatgtcaggatcaagaaagatataaagccgatcaccaatgcgcgtgaggtaatcagtgcaatcaccgggtatacgttcaagaagagatacaacctctatgacgtcgccgaaccgctttataccgaagaggcggggatcttggcccaggagcttgagctggtggcgcctgaagccgtctcaaaaaatgatttcggcgcccacgacctcgaaaacaatccgattgatgatttacgcgcggtcaactatgcggggatcacaccctacctgatagagctggcgaagctacatgaggccgagatttccggtttgaagggagaagtggcacagcttaaggcactcgtgtcttccctggtgaagggctcttaa

SEQ ID NO: 569 - DNA, 711 bp, Kosakonia cowanii
  source 1..711: mol_type = genomic DNA
atgcgggacaagacaatcagcgagattctggcgcatgcggcgcaggcattcccggctgaatgctgcggtgtggtgatccagaagggacgggttgagaagtatatcgcctgccggaatctggccacctccccggaagagcagtttgaactctcgccggaagattatgcgtcagccgaagagcagggcacggtggttgctgtggtgcacagccaccccggcgacggcgccacgacgcagccgagtgaactcgacatgctgatgtgcgacgcgaccgaagtgccgtgggtgatcgcttcatggcctgaaggcgatatccgcaccatcatgccgcgcggcgatcgcccgctgaccgggcgtcagtttgttctcgggcacgctgactgctggtcccttatccgggactattttcgcatcgagcacaatatcgacctgcccgactacagcgtcgatcgccactggtgggaggagggcgaaaacctctatatggataactggtacgcatgcggtttcagggaatacgacggttcctcccgccccggtgatatggtcatcatgcaggtgcaggccagcgtgccaaatcatgccggtgtcctgctggagggcaacatgctgctgcaccacctgtacgggcagctcagccagcgcattccgtatggcggctattaccgtgaccggacaattaaagttttacggtacaaggacctgatgtaa

SEQ ID NO: 570 - DNA, 732 bp, Kosakonia cowanii
  source 1..732: mol_type = genomic DNA
atgaacaaaactattatggccgcaatccgtgcgcatgcgctggaggaatatccgcgcgaatgttgtggtttcgttattcagtctggccgtcgacatcgctatatccctgtgcagaacacccacgaaaatccaacagagcatttccgaatcgatggagagttctgggcgaatgctgaggacatcggcacaattatacgcgttatacattcccaccccggcgacggtgcacggcctataccgtcggacctggatcgccagcagtgcaacaactccggcgtggtctggggtatttacgcgccagacagcgatgaatacgccgagataatgcccgaggcggtgccgcttatcggccgcccgtttatcctgggttcacacgattgttgggggcttatcatggactggcacgccacccaaggcgttatgttagacgatttccgcgtcgattatccgtggtgggaaagtcagtactcggacaacttctatttcgataactgggagcaagaaggcttcatcgaatgtgacccggcgcccgggtgcatggtcatcatgcaggttgaatccgataagtggaaccatgcgggcattatcactgaagagggtgagctgctccatcacctgtatggccagccctcctgcattaccccctatgcccgcggctatttcaaggacaggacgatgatctgcgttcgccacaggagcctgccagaggagataaagccatggcgcgtttaa

SEQ ID NO: 571 - DNA, 339 bp, Kosakonia cowanii
  source 1..339: mol_type = genomic DNA
atggcagttgagaccttctcctggtgcccgaaggtggcggcgcaggctgataccagtttccgcacccgtaaagcgcagttcggggataattatgcacaggtggccggggacggcatcaacccggtcacatcgcaatggagcgtgagttttaccggcgatgaagcctatgtcggggccataaaggcgtttctgaagcggcatgccggctggaagtccttcatctggaagccgcccctggagcccgcagggttatggcggtctgaatctgttcagatagccacccacggcaacgacaaatacaccctcagcactacattcattcaggcataccatccatga

SEQ ID NO: 572 - DNA, 351 bp, Kosakonia cowanii
  source 1..351: mol_type = genomic DNA
atggctgttgaaacctataaatggcccgcgcaactcggagcgggcgcaattgaatataaccagacaatccgggcctcacagttcggtaacggttatgagcaggtggctgaaaatggcatcaactctactgccattaaggttccgatgatttatgttggcaaagaggtgttgatcaacgaaattcgctcattcctgctggctcataccgttaaggctttcatcatcacgccacccggcgaggagaaggggttgtatcgggtcgtcaaagattctgtgcgtaagaaccagatcagcagcaacgcagcagagcttactttcaccataaagcgcgcctacggcgtctatgcctga

SEQ ID NO: 573 - DNA, 3492 bp, Kosakonia cowanii
  source 1..3492: mol_type = genomic DNA
atggcaacgcttcgcgaacttattataaaaatttcggctgactcaagttctttccagagtgagattacccgcgcctctcgcatgggctcagattattacagaacgatgcaggctggaggtcgccaggcagcagctgccgctaaagagagtgaaagggcgttatctgatctcactaatgggttcgcatcagcaggtaaagctgctgctgccgctgctgcggcctttgctaccgggaagctggtacagattgcagacgaatggaactcagtgaatgctcgtcttcaacaggcttctgcttcggctgatgattttgcaacttcacaacgtcagcttatggaaatcagtcagcgcacgggtacagcgttctctgataatgccagtctcttcgcccgcgcagctgcatcgatgcgcgaatacggctatagctcggaagaagtgctcaaaatcaccgaagccgtttcaacagggctcaagctttccggtgccagcacgcaggaatcaagctctgtcattacgcaatttagccaggcgctggcccagggcgttttgcgtggcgaagagtttaatgccgtcaacgaaagcggcgaccgcgttatcagggcgctggcggctggcatgggtgttgcgcgcaaagacctcaagagtatggccgaccagggcaagctcactatcgataaagtagtgccagcattaatgagccagctcggggcgttacagggtgagtttgcaacgatgccgcaaactgtttcaggctcattgcaaaaggtcactaactcgttcatggggtgggtaggtggtgttaacgcagcaacgggtgccacggatgcgctgtccggtggccttgatggcgtagcccagactctggactcctttacttcatccgcggtgagcggtgctctgagtgatgtggccgacaatatgtcggttatcactaccgtagcaggcgcgctggtgggcgttgggctggctaagtatctcagcggaattgttaccagcgccacgagtgcaacaggtgctttgatctctgctgcgaaatcagaagttgctctcgcagtagcgcaagacagggcagcccagtcagccgtggcggcttccagagctgacgtctatcgtgcacagcaagctttgcagagagcaaagggcgctgatgttcaggctgcgcaacaggaaaaaatagcggccgcagaggcaaaggtaacagcagcacagagcaggctcacgacggctcttgccggaggcactgcaacagagaaagtcagggccagagcagcgcttgagcgtgctcaggcaggtcttgcagctgctaaaaatgcagacgtacaggcagttgctgaacgacgacttgcacaggcagaggccgcgcgtgacaggaacctggccaaccgtgtctcgacccaaagtaatttaaacagtgtcaccgctgtcggatcgcggctcatgagtagtgctctgggtattatcggtggcattccagggctggtgatgcttggcgcaggggcgtggtatgcggcatatcaaaatcaggagcaagcccgtcggtctgcacaggaatacggcagaacaattgatgaagtaagccagaagatcaagcaaatgtctttgcctgaagcttctgataatgcagataagtctaaaaaggcccttgatgaacagaacagacttatcgatgagcaaaaaagcaaagttgaaagcctgaaaaagcagattgccggctcccagtatctcatcagtaatcccggcccgatgaccaaaggtggtttcatgataaaccatcttacatcccttaataccgtgaccgacgaattgtctacagctacaggtcagctttccgtcgaacaagaaagactcgcacaaatgcagggaaaagcggcctcaattcaaaagatccttgaggacattgagcgtcgccggaatgatgcaattcgtgaacaggcctggcgtcagaatgctgcctatcagtccctgctgatgatgaacggtcagcatgaaaaatttaatcagttgctcgggctcggcaatcagttactgatggcccgtcaggggatgacactggcaccccttcgcgtacctcaggctgaagcctcgcaggcacagaccgatgcgctcgaaaaaagccgccgcgagctggccctgtcccgcctgaaaggcgaggcaaaagagcgcgcacggcttggctatgctgctgatgaactcggcctgacggctgatccgcaattccagaccaaccggcttgagtacatcaataacgggcttgaagagtggcgcaataacgaggccaacaagaagcagcccaaagggccaaagacggacgaagaaaaggccgctgatgcttacaaaagaatgattaagcagcagaaggagcagatcgccctgcagggccagagtaccgaacttgccagggtgaaataccaggtggttgaaggcgaactgtccacgctggacaaggcgcagaaggctgagctgatgcgcaacgctgccttaatcgatcaggtaaaactgcgtgagcagctgcgtaattacgaggcgaatctggctgacagcaacgccagcgcccgggcggccaatgatgcgcagctcattggttacggtcagggcacccggttccgtgagcggatgcaggagcagtttaatatccgtaaggagtttgagcagaagaataccgatctgctccggcagcggcaggccggggatattaacgaaaccttttatcagcaggggctggcactcaataaacgctatctggaagagcggctgcgcgaccaggaggggtattacaccgcttccgatgcgcagcgcggtgactggttaacaggcatgtcagagggctatgcgaactgggtggacgaggcaacggactattccgcgatggctgctgacgggatgaagcaggccatgggcggcgcggtgaccaccattaccgacatgctcaacggcaatctagacagctggaaggactggggcatgaacgtcctgaaaattatcgagaccgttctcgttaatatgatggtcgcgaatgcggcaagttctctcggttcgcttttcagctttggtgcctcctcagcggcaacggccagcagcgggacggccattcagagcgccgcctcaaacttcaccttcaacgccaaaggtggcgtctacgactcaccctccctcagtgcctacagcggtggtgtctaccagaccccgcagctctttgcctttgcgaaaggggccggggtgtttggcgaggcaggtccggaggcgattatgccgctcacgcgcgcagcggatggttcgctcggcgttcgcgcagtcggcgcgccgcagttttccggcggtggcccgtccgtgtcgtttggcgatatcaacatcaatggcggtgcgcagtccacggcaggacagggggctgccgcaactgccggcaggcaactcaaggatgcaatcgtgaccgtaattaatgagcaggccagcatgcccggatcgccattgtggcggcttttgaaaggagcgtaa

SEQ ID NO: 574 - DNA, 3717 bp, Kosakonia cowanii
  source 1..3717: mol_type = genomic DNA
atgtctgatattgcaacaatttcgctccgggtgaataccgccgagctggagcgcgggaacaaggcgctggacgatttccagcagacggccggcagcgcggcaaacaaggccgatgatctgaacagcgttttccgggcgggtgccgacagtcagaaaaaaaacactcagagcctgaaagagcaaaaagaagagttgcaggctcttctgaataaaatcagccctgttaaccgggcaatggatgagctggaaacgctgcaaagcaaactggctggctttcgcggtaagggactgctcggtaatgaggattacagccggtttagcgcagtgctggataccacccgcgataaattatttcaggtcatggaagcagagaccgccgaagggcaggagcgactgaagctggctcaggacacgcaacgtgccgccgcagcgcaggactcgttcctgaaatctcttagcgagcaggctgctaccttccgggcctcaaagtcagatgtgcttgagtatcgggcctccatactgggtttaacgcaagaagccgccccactgattcagcaaatcagggaaagagaactggctatcgccagtgaggctgtgcagacccggattgccgcacaagagcttcgtgagaaacaggccgcagagcgccaggcgttagctgaagcatcccggctgcagtcacaaaatgataacttcgtcgagtctctccgtaatcaggctcaggctatcggtaaatcacgtgctgaggtgcttgagctgaaagcggctcagatgggactgctgcaggaggccggaccgtacatcgctgcgcttaaggcgcaggaggccgcaaccgcacaggaagcagcaaataaaaaagtttctgccatgcaatcccgcatgctcagggatgcgattgcagagctggaggctgcagagcgcgccgaggcatccgagatgcaacgtgcgcagaatatccgcgactcatttgtccggaccctcgaacagcaggcggcatcgatcgggaaaacacgggtcgaattgctggaaatgaaggctgcccaactcggtgtttcacagcaggcagctccttttatcgaaaagcttcgtgagcaggatgaagcatggaagaagggcggcattagtgccgggcagtaccggcaggcattaaggatgctgccggcgcagtttacggatatcgccacgtccattgctggtggcatgccattgtggatggtgctgatccagcagggcgggcaaatcagtgattcttttggaggtctgggcgggctttttcaatttatcaaggaagaggttcttgggtttaaagaggcaacagacgactcttcagaatcactttcagaaaatgcgaactcactggctgagaatgccgaacatggcaggggtatgctttctttcctgactcctgccaggcttgctgttggtgggcttgtaggggtggcttcacttctggcaattgcatggtacaaaggcgcccaggaagccagtgagttcaacaagcagcttatcttaaccggaaactatgctggtaaaacggcggggcaacttagtcaactttccaggcaaatagcttatgatgctggtgtgacaataggagaatcatcggcaactctggcgaaaattgttgggtcgggaagatttgatggaaataaacttgaggttgttgccagagcagctgcggccatggaagatgcggttgggcagtcaatagatactacgatagctaatttccagaaactttacgactcaccagtaaaggcgtccattgagctaaacactcagttgcattacttaactgcggcggagtttcagtacatttcggctcttgagcgccgcggtgataaggaagaagcagggcaaaaagctgctgatagttatagtcgggcagaacagcaacgcagccagcaggttattgacaaccttggccttattgatcaggtgattcgtggcgtatctgatacatggaaagcatattgggatgcagccttaggtattggtagaaaagaatcgacagctgaacagcttgaggttgtgaggcaaagaattaaagaaatcaccaatcaatcccgtccaggtgtttttggtatgggtaatgtcggtgatggtggtgctgcaaaaagggagttggcggcattgcttgagcaagagagagagcttgggtttgttattaaatctcaggaaggttttaaccagaaaagggctgagtttaataagataaatcaagatggtattgatgcgcagatatcgtttaataaatatttggatgctggaaccactcaagcagaaaaaagagctcttgcacaaaaggatttgaacaaagctattgccgataacgcgaaagcagttaaggcgacgcagggcttgccttatgagcagagagtcaacccattgactcctgaacaaatatctaaggcccgagctggcatcgagaagctgtataaagatccaaagatccctaaagccaagggcataacggtggcagcaggggatcgtgctgaggattctgcgcaggctgaactgctggcccttcaggcgcaactgaaaacccttcaggatcatcgttctgttaatgacaaaatcagtcagcagcgcaacgacctttatgctactgagtctaaatttgccgtcctggaagcggccgcgagcacccggcagttatcgaagcaggagaagtcactgctggcgagcaaaaaccaggtgctgcaacttgcgcagcagaaagctcttctcggtgaccagattaccgctcaggagcaactgaataagcggatggatacggcgcagaagtacgttactcagatggtggagaagcaagccgggcttgcatctggagccacaatgagtgacagacttgccgggcgacaggcgtctatgtcccagctgcgtagtggctggctcaatgcgggcggtagtctcagcgataacggttataaacaggagttaaaggccgccaacgattactatgcagcagaagacaaactacgtggcgactggatggcaggtgccagaaaaggctgggccgagtaccttgatgcggcaaccaacgtttatggctcaatgcaaagcgtagcgcagtcagccctgggcggtatatcagatatgctgacaaacctggtcactaccggaacggccagtttcaaaagtttcgctgcctccatgatgaagatgatcgctgatgtgattaatcgactgctggtggcgtacaccgtgcaggccgcaatgggatggatttctgcaggtacttcaccagcaggtagtggtgcaggccagtcttttgctgtcccgtctttccggccagcgtggaacgggggatatatccctgaattcgacaccggcggttacacaggcgatggcggcaaatatcagccaaaaggggttgtacacggcggtgagttcgtctttaccaaagaggccacagctgcaatcggtgtcaataatctttatgctatgatgcgtggtgcgcagggatatgctgaaggtggggttgtcggcagaccgcccatgctggggcttatgtccggttctggtaatgctgcaccggtaattaacactactgtaaacgtcgatgccagcggtaacgcttcgtctcaatccagcaactctggggacgctatggggcgcgccatggcggctgaaatacaaaacgctgcaaccctggtagttcagaagcacctgaagccagggggcatgatctacaactttacgaagggacgttag

SEQ ID NO: 575 - DNA, 3804 bp, Kosakonia cowanii
  source 1..3804: mol_type = genomic DNA
atgaccacgacaatgatcaaagggcgtaagggcggtggcacaaagacccgcaccccggtggaagccccggacagtattcagtccatagccagagcgaaaatcctcgtcgcgctcggcgagggggagttcgccggcggcctggacgggcgcagcatttatcttggcgatgcgtcatcgtataccccgctgcagaatgccgacggcagttacaacttcaacaacgtaaaatatgagttccgctccggcacccaggaccagagctacattcagggatttccgggcgttgagaatgagctgcaggtcgcctacgagcttaaagctgctgtgccgtatgtccgttccgtctccaatacccagctttcagcactgcgcatccgcctcggctggccctcgctgctgaaccagaaagacaacggcgataaggtgggtacgcgcgttgagtatgcgatcgagctgtcggtcgacggtggtgcatacgcgcccgtggttaaaggcgctgtcgatgacaagaccaccaccctctatgagcgcagtcaccgtatcgacctgccgaaagccacaaccggctggcagctgcgcgtgcgccggattacaccggattcaacgacagtgaatgttgtggacagtatgcgcgttgaggcggtcaccgagatcatcgatgcgaagctgcgttaccccaacacggcgctgctctacattgaatttgatgcgaagcagttcccgaacggcatcccgcaggtcgtctgcaatccgaaggggcgcattattcgcgtgcctgatacctacgatcctgacactcgcacctattccggcacctgggaaggcgggtttaaatgggcatggaccgataacccggcctggatttattacgacatcgtgctgaatgagctgttcgggcttggtaagaggattgatgcgacccagattgataaatgggagctgtaccgtatcgcgcagtactgcgatcagccggtgccagatggcaaaggtggcagcggtatggagccgcgctttcgctgcaacgtctacattcaggagcgcaatgacgcctggacggtgctgcgtgacctggccggcatattccgtggcatgacctactggggcgacaacaagctgtatgtgctggccgatatgccccgcgatatctggcacatttataaccacgccagtgtggtcgacggtaagtttacctttgccgatcccagcgaaaccacgcgcaacaccgccgcgctggtgaactggtccgatccggcgaatcactacaaagacacaccggaagtggtttatgacaacgatctggcgatgcgcttcgattacagccagctcgaaatgacggccatcggctgtacccggcagtcagaggcaaaccggcgcgggcgctgggcgctgctcacgaatggtatcggtgaggtggtgaccttcagcacgggtatggatgttcctcctgtcggtgaggtgatcggcgtggccgcgaacgagctggccggcagggtgattggcggcagggtaagcgcggtgaacggtcgtaatatcacgctcgaccgtgccgcagatgtcaaagctggtaaccggcttttcctcaacctgccctctggtgtcgcgcaggcccggaccgtgcaggcagtgaagggcaatgttgtcacggtcaccacggcctacagcgaaccgcctgaggcggagtgctgctggggtgtggatgctgacgatctgtttatcgcgctctttcgcgtaaccggcacccgtaacaacgatgacggcacgtttgaggtgaccggtgcgacctataacccggatatttatgctgcggtcgataccggcgcccggctcgatgaacggccggtcagcgtcattccgcccggcgtgcaggcaccaccggaaaacatcgttatcgacagctactcgacggtcagccagaacatagcgatcaccaccatgcgtgcggcatggaaacccgtcaaaggggcgattgcctatgaggctgaatggcgccgtgacagcggtaactgggtgagcgtgccccgcacctcctctcagggattcgaggtgccgggtatctacgccgggcgttatctggtgcgggtacgggcagtgaacgccagcgatgtgtcgtcgatatgggcgacatctgccgaggtcacgctcaccgggaaagtgggcaatccaccgaagccggtgggctttaccgcctccgaaaatgtggtgtttggtatcgagctgaactggggcttcccggcgggcacggacgacacgctgaaaacggagatccagtacagcctgaccggcagtgctgacgatgccatgctgctggccgacgtgccatatccgctgcgcagatatcagcagatgggacttaaggccgggcagattttctggtaccgcgcgcagctggtggaccggaccggtaacgaatccgggtataccgactgggttcgcggccagtccagcaccgatgtgaccgacattacagaggcggtgctcgcgcagatcaaggataccgaactcttcaaagacctcatcgagaacgccgttgagagcagcaaggcggtcgcggatctggctgaggcagtgaagcagaacgccgacggcctggctgaggctgcaggcgcaaaccgccagacagcagaagccattatcggtaatgccctggcgatcgcggatgttgttgtccgccagtctgcccagcagggcgctaactccgcgaaatttgagcagctgcgcgaagttatcgccaccgaaacagaggcgcgcgttacggatgtgatccgcctggaggcaaagacggatcagaacgccgccggcatcaccgaagtgcgccaggcgctggcaaacgaaaccgaggctcgagctactgctgtcgatcagcttactgcgcagacggaagagaacaaagccagtgtcacagcgctgacgcagaccgtgacggatctggactcatccactgcctcacgttttgaggagatatcggcagagatcgcgggcatagatggcagtgacatcagagggggaatacagagcaactccatcgcgctgatcaccaccacgctggcgcaggttaatgatcgcacacggctcagcgtgcagtacggcgacaacaaggcgggaattgaacgtgttgataacgtgatggccgatgccagccaggctgtcgcggagtcgctcaggtcgatggatgccagttccggcgccggcacggcaaacaccaccgactttgcgaaaaccatggctgacttctcgcaggtctccgcgacaaaaatcaactccctgtcagtgacggtaaacggtcagcaggcggcaatcgtccagaatgctcaggtttcggccgacatcaacaacaacctcaatgcgatgtacagcatcaaggtgggtgtggatgctaacgggcgccagtacgctgcaggcatgggtatcggcgtgcagaacacgccggcgggcatgcagtcgcaggtgctcttcctggccgaccgtttcgccgttatgtcgcaggcaggcgggaccgtgagccttccgttcgttatccagaacggacagacattcatcaacgatgccttcttcagggatgccagcattcagttcggtaagatcaccgactccctgaagtcagataactacgccgcaggatctgcaggctggaatctgccgaaaagtggcaacgcggagtttaatcaggtaacggtgcgcggcgcaatttatgccaccaacggcaatttcaacctcaccgggccgggcaatacgaccgtgattaatggcctgggcgtcacggttaaccttgcaaacggcggtcttataagactggggagctggtaa

SEQ ID NO: 576 - DNA, 3783 bp, Kosakonia cowanii
  source 1..3783: mol_type = genomic DNA
atggaaacgatcactggttctaagggtggcagccagaagcaacacactcctgttgagcagccagattcagcgcagtcaatggcacgctgtcgcttgctgctggcgctcggggaaggggaatttgctggtgggctggatgcgacaaggattttcctggacggaaccccgctgggcaatgccgatgggacaatgaattttgaagacgtatcttgggattttcgcccgggcacacagacccagatgcctattccaggttttcccgccgtagaaaatgaaagcaaggtcggcgtgtcgttgacaaaatcaacgccctggacccgcgcgctgagtaatatccagattgatgcggtgctcgtgcgcattggcattcccggcctgcagcaacagcagaataatggcgatatcgttggtacgactgtcaaatatcacatcgacctggccgtagacggcggcgcgttctcgacggttatgaccaggaccgttaccgagaagctcagctcgctttatgagcttacccaccgcatcaacctccccaaagccactaccggctggcagattcgcgtggtacgcgatacggacgacagcaccagccagctgctgcagaacaaaacgcaggtgcaggccatcacagaggttatcgacgctcgtcttcgttatccgcacacagcactgttgtatgtgtcgttcaatgcaaaatcattcagcgatataccgaaaatctcctgtaaaccgaaggggcgcatcatccgaatcccctcaaactacgatccgattgcccgtacttacagcggcacctgggacggcacgttcaagtggggatggtcgaacaacccggcatggatctggttcgacgttctgaccgaaccacgtttcggccttggtcgccgcatcacggcggatatgctggataagtgggagctataccgtatagcccaacgttgcgatcagaaggtgcccgacggaaagggcggcagcggcaccgagccgcgctttatgtttgacgtttatatacagtctcaggccgacgcatggcaggtgatcaaggatatcgccgccgggttcaacgggatgacgttctggggcaacaacatgttcaacgttgtctctgacatgccggcggatacgtcgaaactgcagatcctcaaccgcgctgcagtgatcggcaagccggtctactcaagcggcagtgaaaagacccgtttttccagcgcgctgattaatttcagcgatccggacaatcactatcaggatcgaactacggctgtgatgttcccggacctggtgaaacagttcaagtttaagcagacgcaaatcacagcgatcggctgtacgcgagagagtgaggctcagcgtcgtggtggttgggcggtgtattctaactctcttgaccgcattatcaccctacaaactgggcttgatggctatgtttatgtgccgggcacggtgtttgcctttgccgatgaacgcctttctggtcgcgtgtacggtggtcgagttgccgcgtacaacgccgggctgaaggctgtgacaactgatcggggcaccagcgcggttgctggcgacacgctgatgattcgcacgcagggtggaaccgtcgaaagtcgggttatccaggctgtaaatggaacgcagcttgtggtgtccaagcccttcaagacggaccctttgccgaatgtagtatttgttatagacgccgggcagttgagattacagtactttagagtaactaatctgacgttcaatgatgaggaaaacacctactccatcacaggggcagaatataactcctctaaatatgacgcggttgacaataatgcccggctggatacgccgccgatcagcctgattccgaccgggcttgttaatcagccgactaatatccaggtatcaagctttgaatcggtacgacagggccagcgcattactacactgatcgcctcctgggatgcgccacttgataaaaatggcaagcctcaggccgatgttatctcataccaggtgcagtggaagcgtggagataatgaatggattaacgtgccagaaacaggactgcgcaatatagaagtgcccggtatttttgagggtgactatcttgtacgcgtgcgtgccatcaactcaggaggggcttcaagtctgtgggcctcttcactgctgacacacctcaaggggcgcgtgggcgatgttccaaagccggtagggctgtcagcgtcagaggatgtcgtattcggtatcaatgtcacctggggttttccggccgatactgctgatacgctgagcacggaactgcagtacagcctcgctgcagacggctcaaacccgatgctgctggcggctgtgccttacccgcaaaaactctaccagcagatgggtctcaaggctgggcaggagttttggtaccgggccaggcttgttgaccgtaccggcaatcagtcagcctacaccgaatgggtacggggccagtccagcaccgatgtgacggacattacagaggcagtgctcgcgcagatcaaggacacagacctgttcaaggacctcattgagaacgccgtggacagtagtgccaaagttgcggaactggcagagtcagtgaggcagaacgccgacggcctggctgaggcggcaggcgcaaaccgccaggcagcggaagccattatcggtaatgccctggcgatcgcggatgttgttgtccgccagtcagcccagcagggtgctaactccgcgaaattcgaacagctgcgcgaggtgatcgccactgaaactgaggcgcgtgttaccgatgtgatccgcctggaggcgaagacggaccagaacgccgccggcatcacagaagtgcgccaggcgctggcaaacgaaaccgaggcacgggctacagctgtcgatcagcttaccgcgcagacggaagagaacagggccagtgtcacagcgctgacgcagaccgtgacggatctggactcatccactgcctcacgttttgaggagatttcggcagagatcgcgggcatagatggcagtgagatcagagggggaatacagagcaactccattgcgctgatcaccaccacgctggcgcaggttaacgatcgcacacggctcagcgtgcagtacggcgacaacaaggcggggattgagcgtgttgataacgtgatggccgatgccagccaggctgtcgcggagtcgctcaggtcgatggatgccagttccggcgccggcacggcaaacaccaccgactttgcgaaaaccatggctgacttctcgcaggtttcggcgacaaaaatcaatacgctttcagtgacagtcaacgggcaaagtgcggccataacgcaggcatcgcaggcagtcgcagatatcagcggcaacctcaatgcgatgtacagcatcaaggtgggcgttgatgccgctggccgccagtacgcagcaggcatggggatcggcgtgcagaacaccacggcgggcatgcagtcgcaggtcatttttctggccgaccgtttcgctgtgatgtcgcaggcaggcgggacggtgagcctgccgttcctggtgcagaacgggcagacgttcatcaacgaggccttcatcaattacgcgtcgatcaccctcgctcgcgtgggctcctggtattcagcaaattacgtggccgggcagaccggaaccatcatgaaggctgacgggacgtttgaggtcaacggcgcggtatcaggccagggacgcatgcagataacgaataaccgtatcatctcctacgatgcgcaaaaccggccggcagccgttatggggcaacgcttataa

SEQ ID NO: 577 - DNA, 759 bp, Kosakonia cowanii
  source 1..759: mol_type = genomic DNA
atgagcatttcatctgatgtccagaaactggagccgggcagccgtgtccgccttatcgaggttgacggcgaggcgttcggtgccggcattctgcggtttcataacgaaaccctccctcacacagaggccgaaatcattgctgcgggcggcgatgcgtcgaagctccagccgaaatcggtctggtggcaggggctggagtacggtgcatggccctttgaactgaccggtctgtccgtcagcagcgacgggcagagcgcccgaccaacactgaccgtggcaaatatcagcggcacgattggcgcgctctgtcgtcgctttcagggaatggcaaaggcaaaagtgattatccacgagaccttcgctcattaccttgatgcccgcaattttgccggcggcaatcccggcgctaatctgaatgaggagcgcaaacaggtctattacattgaccgtaaatccagttcggatgatgaaaccgtggagtttgaactgtccagcccggcagacctgcggggacagcttatccccacgcggcagatccagcccatgtgcacctggtgcatgcgcggatggtacaaaaccggtaacggctgtacctatgccgggcagaatggctggttcgataaggacggcaaccgggtggatgatccttcgaaggacgtgtgctcaggactgctgtcaaacgggtgtaagccgcggttcggcgccaacaatgaactcgactacggcggctttccgggggcgtcacttctgaggggctaa

SEQ ID NO: 578 - DNA, 774 bp, Kosakonia cowanii
  source 1..774: mol_type = genomic DNA
atgacagcccttattgatacggcagccatgcttgcacctggcggaaaagtccggctggtagaagtggacgcctcagaattcagtggtggtattcaccgctttcattacagtccttttccgcatacttcacgggagattgacgaggcgcagggtgacgaaagcaagctcgggcctaagcctgtagtcttcgatggtgaggtctatgatttctggcctttccagttaacaggcttggctctctcaactgaccaggcggcagagccgtcactcagcgtctcaaaccttgacggccatatctccgcgctatgccttcagtttaaggacatggtgaacgcgaaggtgagcattatcgacacctatacggtgtatctggatgcggtgaattttcccgaccacgttaatcccactgccgatccgactatgttcacgcttcagaccttctggctggatactaaaacgtccgaagatgatgaggtggtgacctgggggctaagcagcccggcagaccttcaaagcttggtgatacccacacggcaaattacgtcgttatgtgagtgggcgctacgtggtcaataccgcagtggcgacgggtgcacttacaatggcacggcatactttgatgcaaacggtaatccggtgtcagatccggcccaggatttctgcggcggctgttttagcgactgtcgtaaaaggtttggtgccgggctggcagaacctcagtctgccatccttgattttggcggcttcccggcaacagttcttttcacacgataa

SEQ ID NO: 579 - DNA, 600 bp, Kosakonia cowanii
  source 1..600: mol_type = genomic DNA
atggaaaaacgaaccgttatcaagctgagcgggtcgatggcgcagcgtttcgggcgcacgcaccgccgggcgctgtcctctgccagcgaggttttcagggcgttgtccagcacggtggacggctttgaggattatctccgcgaggcgcgtgccagggggctcgacttcgttatcttccgcgatcgccggaacatcggtcaggaagagttttcgcttctcggccccggcgatgagctgcgcattattccggtgatccgcggcagtaagcgtgccggcatcttccaggcggtgctcggggctgccctgattgccgggggtatcgcccttggccctgccggagccgggctcatcggtaaaggggtcgcgctgaatgttgcgctggtcggcgcatccatggcgttgggcggcgtggtgcagctgctgtcgccgcaggtggcgggaatgaggatgcgtcaggaccctgataacaagccttcctatgcgttcggtggtccggtcaacaccaccgccagcggcaacccggtacccctgctctacggccagcgggagatcgggggcgctatcatttcagccggcatttacgcggaagatcagcagtaa

SEQ ID NO: 580 - DNA, 600 bp, Kosakonia cowanii
  source 1..600: mol_type = genomic DNA
atggcgcgtttaacaactattcgcctgtatggtgcgctgggcgcccggttcgggcgagtgcataagctggcggtgcagacatccgccgaagcggtaaaggccctgtgcatcaacttcgacgggctggaagactacctgatgaacgccaaaaagaacggtatgaccttcgccgtgtttcgtggaaagcgcaacataggcgtgcaggatttccaggagctggctggtaaaagtgatattcgtattgcgccggttatggagggggcgaagaaggcgggtatgttccagaccatcctgggggcagtgatggtggtcgccggtattatcgtcggcgtggcgaccggctggaccggtgtaggtctcacctttggtgccggactcatcttgtcagggtcgtcaatgatggctggcggcctatatcagatgctgtcaccacagcccaaaggattgcaggggcgtgatgatccggacaataagccaagctatgcattcggtggttcagttaatacccttgcgatgggaaaccctgtcgcgttgctttacggcgagcgtgagattggcggagccattatctccgcaggggttgtcgctgaagacatctga

SEQ ID NO: 581 - DNA, 804 bp, Kosakonia cowanii
  source 1..804: mol_type = genomic DNA
atgaaacttgaatcttcactaaaacacttcagtcctcaggggatgaatatcagcgacagcgttaaaggcacctctcctgacaggctgaccggtacagatgtaatggcagcgattggcaccaccagcagccgcgcgcgcttcggtcttgctgcgttcttcgggaaggtcggcatcagtaaaacagatgagcaaatcgcagtacaggcgctggcacggcacgcgatggatgttgcgccgaagaatgtgcgtaaagctgctggtggcgagtttggctggtgcatgcagatgctggcgcagtttgcctttgctgagtatgcccgttcggcagccagcagcagcacctgcaccacctgcagcggtacgggttttttctcccggattgaggatgtgatcaaacatccgggtattttcgatgctgacggtgtcgagctggttgccccgaagattaagcatgagcaggtaaaacatgcatgcacagcctgtggcggtaagggcatcattcctgcgcgctgccgctgcggcgggaagggggaagtactcgatcgagtggcgacgaaagagcggggcgcgccggtattcaaaacctgtgagcgatgctccggcattggcttctcttcagtgccatcaacggctgcacacaaggcaatcattcggcgcctgccggatctgcatgtcagaacatggacccgtaactggaagccatttattgaatcgctggtggagatttgtaagcaggaagaggccaaagctgaaaaagaattccagtctgcaaccaaatatcacgacgaagacaacataatttag

SEQ ID NO: 582 - DNA, 1128 bp, Kosakonia cowanii
  source 1..1128: mol_type = genomic DNA
atggctgccagaccccgtaaaaataatgtcagcgtaccgaatctatatccgctgtatagccggaaggtcaataaggtttactggcgttataagcaccctatcacgggaaaatttcatgcccttggtactgacgaagcagaggctattgcaattgctaccgaggcgaatactcgcttggctgaacaacgctctcgccagatcatggcgattagcgacaaaatcgcgaccagcaaaggtaaagctataaccacaaacacttggcttgaccgttactggaatattcaaggtgagagactggatagtggcgatattaagctgaacacctataagcaaaaggcaaaaccagtagctttgctccgtgagcgagtaggtatgaagctgatttcatcggtagatgtgcgagatatagctgaaatactagaagcctacatttcagatggccaacccagaatggcgcaggtgatacgctcagttttaattgatgtatttaaagaagctcaacattatggggaggttccccccgggtacaaccctgcccttgcaacaaagcagccgcgcaggcgtataatgcggcaacgccttaatctggaagaatggcaaaaaatttttgatattgccgacgtaaaccacaagtatatgggtaacgcgatgttgttagcccttgtgaccggtcagcgcttaggcgatatctccaacatgaaattcagcgatatctgggatgaccatcttcacattgttcaggagaaaaccgggagtaagatcgccattcccctcgcgctgaggttaaaggcaatcaactggagcttgcgtgaagtagttgcgcggtgccgggattatgcagtaagtccgtatctggttcattttttccgcgctacttatcaggctgaacgtggggcgcaggtgaaatccaataccttgacaatgaatttcagcaaagccagagatatagcgaatatagactggggggatgggactccagcgacatttcacgaacagcgctcgttgtcagagcggctgtataaagaacaaggtattgatacaagaagattgctgggccataaatcccagcaacaaacagataggtatcacgatgatagaggaaaagattggagtaaagttaatatttaa

SEQ ID NO: 583 - DNA, 1083 bp, Kosakonia cowanii
  source 1..1083: mol_type = genomic DNA
atgcagaggccagcccgttacgacgctaacctgccccgtaacctgacctttcgcaagagagataagctttattcctggcgcaacccaataaccggccaggtaatctatctgggccgcattgatcgcagggaagcgatagcccaggccattgaagccaatagctatcttgatcagaactatatcccctccagtctacttcagcgcattaaagaaacgcccaccctgactatggctaaatggctggagaggtatgacgttattctcgagcgaagggaattaaaaccaaacacaatgaaagttcgcaggaaccagatcgagacgatcagaaaagagttcggcaccatcgctcttagcgcagttacaacaaaagacattgcggaatttttggaaacatacatagcctgcgataaaaaaagcatggctgcaggtctgagatctgtactactcgatgtattcagagaggcgctcgtggagggccatatagaaaggaacccggcagaacctactcgcaccccggcaccaaaagttaagcgggaacgtctactgctcgaagcgtattttacgatacgagaaacagcagccgctaattcagtatgggcggcaaatgcatttgatcttgcactggtcacggctcagcgacgagaggacatagccatgatgaaattcactgatatccgggaagacagattgtttgtcatacaggagaaaacagggaataaattagccatccctttagacctgaaactggaagcggccgatcttcatttaaaagaagtgatagaacgttgcagagtgaacaacccatctgagttcctgctttactcgccggtgcgtcggggtggaagaaagcccggaccactgacgccggatgggttaacccaggcattctcagatactcgtgatgtcactgtgcttaaatttggcccttacccgccgtcatttcacgaaattagaagtctggccagtaggctttatgagaaggaaaaaggcgaagaatttgcgcagcggcttttgggccataaaaatttatcaatgaccaaaaaatacttggactcccgtggggctgagtatgttagggtttag

SEQ ID NO: 584 - DNA, 252 bp, Kosakonia cowanii
  source 1..252: mol_type = genomic DNA
atgaaaatgattaacgctgcggcggttgtgctggtttcgttaatggcatcaggttgcgccagcaacacgcccccgcggtgctataacgaggctgtggtgatgaaaaaccgggtatcggttccggtattcggcataagaaaaccggtcagcaccaccgaatatctctccggcggcagcttcggttatcagtggattgagcggagtgcttttacagacacttcggcctgcgacaggctgccggtgactgagtga

SEQ ID NO: 585 - DNA, 954 bp, Kosakonia cowanii
  source 1..954: mol_type = genomic DNA
atgcagatgtttattgcaggtaccagctttgacgccatcaactctatggcggcaagctacgttctggatgtcatcaccattaccggcacagggagcaagacctactccctttcaggtgtatcgctgacatacgccattgtgaatgattttatgggagggcagttaacgggcgcgacctacagcgtcagtgtcagcggattaaccgtatcgtggaacgtcaataatgccgtcacccttattgtgtatggcagcccggtagcgggcacgcagagtgactacttcggcttccagctgttccagtacataaacggggcgaggacggtcaagctggccccgaattatgtgccgctgtgcctgcgccagattatagatgtgccggccggcgcgcgaactgtgcagacgcaggttccggcgggcaacccggtaatgtgttttcaccgtcacaccggcgaggcgatggatttgtgctggtggaagcccgtcacggccagcgggtatcacgcactgcagttccccactgcggcaagtaaccagaccgggtgccgggtgtatgtattttcgaatattctcgcgaatatcccggactatggcttctttctctaccgggccggacagatggtctggcacagcaactgcctcccgctgcaggtcattcctctgactaacggggatatcaccagcgccacgccgctggcggtgtcatcgagtgtcacgtcacatatcttcgtgcctcaggacccggcatatccgacgggatacagcaatttcatgtgtgcatcagcgggaaaagacggggctgcatataaagtgcaggtcgggaaaatattccagagcacctatatcagcaaccccgatgaaggaaggaggatgagagggtgggcatgcggcggtgtcgggtatatcgacacccggttctatgaccagtactacaaaaatgcgctgggcatcacctga

SEQ ID NO: 586 - DNA, 1008 bp, Kosakonia cowanii
  source 1..1008: mol_type = genomic DNA
atggcaaagccggactggggagatctacagcgtcggttcctgtctgagcacgccaaaagcggtgtatcgccaaaagaatggtgtgaagcgcaggggctgaattattcatctgcgcgccggtacattaaaaagcccgcagcgcaaagtgcgcaaaaatctgcgcagaaacaagtgcgcaatgcgcagaaggaaaaagacgttaatgcactggtggaaaacgacggattgacagcgcagcaacgaatctttgtggcggaatacctgaaagaccgcaacgccacccaggccgccatacgtgccgggtacagtgcaaagactgctgagcaaattggttatcagctcctacagaaaacttcagttgccgctgctattgagaaacagcaaaaggcctccttgatgcgaacgcttgccagtgctgatgaggtgctggcgcagatatggcagctcgccaccttcgatgcgaatgagctatcacaatatcgccgtggtgcgtgccgctactgtcatggctttggccataactatcagtggcgtgacatggtggagtttgaagagcagcggctaaaagcgatcgataaaaagggtaaagagcctgtggacgttggcggttacggctatgaccacaaccgggaacccaacccggcgtgcccgcgctgcaatggtgacggcatcggtcagccgtatttcgctgatacccgcaagctaccgcctgtttcccgcctggcgtattccggcatcaagctcggtaaaaatggcgttgagattacagctatcagccgtgagcgcatgtatgaagccgtaatgaagcggcttggcctggcggacagcgagtttgcgcagcagctgcagcagatcgaaatccagcgccgccagctggaggtggaaaaacttcgtaaagagcttgctgccgatccggaggacgaagtaccactgcccgtggcaatcaacattaacgtcgcggatgctcgcgtaaggaaagacgatgacggggatatcgccgacccttaa

SEQ ID NO: 587 - DNA, 540 bp, Kosakonia cowanii
  source 1..540: mol_type = genomic DNA
atgttctgtcgcgagtacctcatcgattttaatgccacgcaagcggctattcgggcggggtacagcgtaaagatcgcccgcgcatcaggttgcgagaacctaacgaaacctgacatccaaaacagaatcgccgaattgaaagctgagcgcaacgagcaggttaatgttaatgcctcttatgtgctgaagcgcctgattgaaatcgaccagatggatgtgctcaacattatgacaaatgacatgagcattaagccggtttctgaatggctagcatcatggcgtcgttacatgagcgggttcgatctggctgatatgtttgaaggccgtggcgaagaccgtgaaatggttggcatcctgaaaaagattaaatggtctgacaacattaaaaatctagggatgcattttgatccgctcggtatcaaatcaacagaaggcgtggacatctgctgggttgaagaggcgcagtctgtgtctactgactcgcgggatattttgattcccaccttccgtaaggggggcggaaattttgatgtcatttaa

SEQ ID NO: 588 - DNA, 453 bp, Kosakonia cowanii
  source 1..453: mol_type = genomic DNA
atgaacctgatcaacctcatcaagaactactcacacgtcattgttatcggtctgatttgcgtggcgctgtgggggctgaatacccgtaacgcccagttaacagccactaatgagcggctggaaaagctggcgaacagcaaagacgaccagattaacgatctgcgctcaaagaatgacggtctggccgccagcgtgggcgagctggtcaccgccgtcaggcagcagaacgaagtgatgagtcaggtcactgaacagcgcgctgtaaccgcacagaagaaccggaagctacagaatgaaattaagcaataccttgaagctgataagtgtgcccagtctcgcgtgcctgacaatgctgctgaccggctgcgcgccgcagcaaaagccgctggtggagtaccggacaataagccagccgcaaatcagcctgccggcagaactgacatcccgcattga

SEQ ID NO: 589 - DNA, 1077 bp, Kosakonia cowanii
  source 1..1077: mol_type = genomic DNA
atgcagaacacaaacctagcagtagccgaccagaacactgtcgttaactcaaacatcgcgctattcgattcacagtaccttaatgccatcagcactttcgcccagattatggcgcagggtgcggcgacagtaccgaaacaccttcagggcaaccaggccgactgtatggccgttgcaatgcaggcggcgcagtggcaaatgaaccctttcgccgtggcgcagaaaacccatctgattaacggcgtgctgggatatgaggcccagctggtaaacgcagtgatttcacgcagcggcgtgctggcgaatcgctttgagtatgagtggtacggcccatgggaaaaagtggtcggaaaatttcacatccgcaaaggtgaaaaaggcgaataccgcgttccgggctggaccatggcggacgaagcaggtatcggcattatcatccgcgcaacgctcaaaggcgaagatcacccccgtgagctggatctgctgctggctcaggcccgcacccgtaattcgacactgtgggctgacgatccccgccagcaactcgcctatctggcagtaaaacgctgggcgcgtctgttctgtccggatgtgatcctgggcgtttacacacctgatgagcttgaagatcgtcaggaaaaagaaatcaacccagcaccgcagcagcgcgtaagcgttgctgatatcccggctgaatcgacaactaacagcgcgcaagagtccggtaccaatattgatggcatggccgacgagttccgcgatcgcattgaagcggctcaggacgtcgacaacgcgaaagcagtgcgggtggatatcgaagcggccaaaactgctctcggttcggcgctgttcactgagctgaaaaacaaagctgtacggcgctactacctggtagacgcccgcaacaaggtggaagcggcgatcaactccctgccccagcctgacgaaccggatgctgcagagcagttcaccaaagcagagcaggcactggctgctgcgaagcgccatctgggcgacgagctgtatgaccagtttgccgttaccctgctcgatatgaagcccgaatacgtggcatga

SEQ ID NO: 590 - DNA, 3396 bp, Kosakonia cowanii
  source 1..3396: mol_type = genomic DNA
atggaatttttctacgtggttaaggccactcagaaatccggtaagcaagatgcagtgatttggttcactgcgaaaagcgaagcacgcgccgccctgacgctcgatgttgagctggaagaggctggtatcgaaactggccgcggtaaagactatgccaaaccgatccacaccgattttccgattgttaacgacctgcctgaagaaggcgtcgtcgacttcacctggtgcgatcgctatcagcttgctgacgaccagcgtacctggaacgtgatccccggtgccgcgccacaggatgaaaccgaccttgccccggccaacaccatctacgatgcagattttcatgccacgcccgtgacggccacggataccgttgatgcggccagcatctcccagcttgaaaaccgcaccccctctgtccgcttcgcagtccatctacttggcgacaaataccattcggagatcagccaagaacaacagatcgtcgccaacgaattggctatggatgaggcaaatgtttatttccagaacctgctgcaggccaaaaatgaagttcctgatatgagcgaactcagccttcacgctgagtggaaactggtgcaggctatcaaagacgttttcccgcagcataaagaacacgaacccgcgctgctggctgctttcatgtcgagctgggtaaaaacagaagtcagcgagcgcgcccagcttattgaagactggctcggcggcagactgccagtccctgaactcatcaccaccagcgatcttggtgatgatgcgcctgtttccaatgcagaagatcagcaggatgctaagcccgaagaggttgcccaggcccacgtacaggcatttcgcgatagggacattaccgaactgcacgctgttcctacgctgtcgttccgtcaccgcctcctcgcgcagtttattaccaagaaggaatacgcgtaccacattgacaatgaacaactgaatactgtgcgccagcttgaaatggacaccgacaactcctacgtgcaaaacctgctgctggccgccgagaatgtcgaagggatgaaaaatcttcgtgacttcgagttctggaggcttaccgatgctgttaagcgcgtatttgcttctgacaaagcgacgcctgatttatctctgatgctccagttcatgaaggcctggaaaacgacggactatatcgatcgcggcctgctcgctaatgaatggattaacggtaaccgggtttcaaccattcagcgcaccgacaccggcactaacgcgggcggcggcatcaaaacagaccgtaatgcagactatgagcatacgttggacacactggatattgagatcgcctgcgcaactctgccgatggattttgatatttacaatatccccggctctattcaccgccgggctaaagacatcgttgctgcaaaagaaagcccctggaaggagtggtcagcagcactgcgtaaaactgcaggtatcctggattactcgcgcgctgcaatttttgcgctaattcgtgaagcgtcctcagccatgacacagtttccggatcgcatgactggctatatcagcgcgacactcaatgaatataagcatgatacacctgaggccagaatcctcgccgctgcgcgacagattgacagcgcggccgtggttgccggagtcattcagggcaccgagccgtcacaccagctcgtcaccaccgctcagccagaagtagccaacctcggcggcggcaagttctccatcaatggtctgctgggtgataaagcaaacccggtcatcaataccccctcaaacgaagtcgcaaaacaggaagtggagaacgtcgatcatgtgcagatggaagagactgacccgagcaaagtcgaagctggtaatgcgttaccagcagtcgaagtcgctaatgaagctgctgcacaaacaattagcgtaagcccggcggatatcctcgccgctgccacaccagaactgacgcgcaacgttgtccccgatctggaccagaatattgatgctcttagccaggatgagccggaattacctccaaccgaaccagaaatgacagaaatagaaccggtagcggatatttccgagccagaggctgctgctaaggaatggccagcttacttcgagccaggccgttatgaaggtctgccgaatgacgtttaccatgccgcgaacggcatcagcagcacccaggtgaaggatgcccgtgtctccctgatgtatttcgaagcgcgccacgtctctaggaccatccagaaggagcggtcgaaggttctcgacatgggcaatctggtgcatgcgcttgcgctgcagccggagacgctggccgccgagttcagcattgagccggagatcccggaaggtgcactcaccaccacggcgacgatccgcgagtgcattgacgagtacaacgccagtctgccgccgcagctgagcgctgatgatatcaaagcgctgctggaggcccataacgccaccctgcccgcgccgctgccgctgggcgcagcagtagacgaaaccgcagaaagctatatggagctgccggaagagttccagcgcatcgagtctgataagaagcagaccgctgcagctatgaaagcctgtatcaaagagtacaacgccaccctgcccgcttcggtgaaaacaagcggcacccgtgacgcactcctcgagcagttggcaatcattaatcccgacctggtagcgcaggaagcgcagaagccacagcccctgaaagtttcgggtacgaaagccgacctgattcaggccgtcaaggcagtcaaaccagatgctgtgtttgccgacgagctgctggatgcctggcgcgagaacccggaaggcaaggtgctggtgacccgccagcagctggaaaccgcgctggctatccagaaagcgctgcatgcgcacacgaccgccggaaagctgctgcagcatcctgatcgcgccgttgagacgagctatttcggcatcgacgaagagaccggcctcgaaatccgtgtgcgccctgaccttgagctggacgtggatggcgtgcgcatcggtgccgacctcaaaacgatttctatgtggaacatcaagcagtcaggtctgcgggcgaagctgcaccgtgaaatcatcgatcgcgattaccacctgagcgccggtatgtacatggagacggcaagccttgaccagttcttctggatcttcgtcaacaaggacgagggatatcactggattgccattgttgaggcttcgcaggagctggtggagctgggcatcctggagtaccgcgccacgatgcgcgccattgccaacgcattcgataccggcgagtggccagcgccgatcaccaccgactataccgacgaactcaccgagtacgatctgcgccgccttgaagcgttgcgcgcggcctaa

SEQ ID NO: 591 - DNA, 270 bp, Kosakonia cowanii
  source 1..270: mol_type = genomic DNA
atggcaaagcttcttaatttggtggaatgggcagccagcgtatattccacccctccctcactatctaccctccgcagatgggtacgtgaaggcaaaatctatcctgccccggagctacacggcaaagagtataaactccgcccggatgctatctatgttgatccgagcaagaagaatttgcgcttaaaaccgcagcatctaaaaattccgtccaaagggactttactggagagattacagaatgcagaggccagcccgttacgacgctaa

SEQ ID NO: 592 - DNA, 678 bp, Kosakonia cowanii
  source 1..678: mol_type = genomic DNA
atgggcttcgcattacctaatggtgccacggtatttgtcggctcgaaactcgccacgcctgtggcggtgacgggcgttagcaatgccgcaggcgctgtctttaccgttgcaaacggccacggtctcgctgttggcgatgtggtgctggtttccagtggctgggctctgattgatagcctggtggcgcgcgtcacggcgcagacgaccaccagcgtaacgatcggggtgattaacagcaccgataccaacttcttcccggctggctccggcaccggttccttaagcaaagtagccgagtggactgagatcccgcagatcaccgaagtatcacagtccggcggtgaccagcagtacacgcagatccagttccttgccgatgaccgccagcgcaaccttgcgacctacaaggcggccaagtcgcagacctttacggttgcgcatgactccacgctgcctatctatgccgtgctgtcagctgctgaccgttctggtgacacgctgccgctgcgcatgtacgtgccaaaggcgaaggaaacccgttactggtcgggtaagccgtctttcgatccgcagccaaccactgcgccgaacgccgtcgagacggtacagcctgcgtttgccatccagtcccgcgaaatcaccttttacaaagatgctgccccgcaggcagccgcttaa

SEQ ID NO: 593 - DNA, 609 bp, Kosakonia cowanii
  source 1..609: mol_type = genomic DNA
atggcagataaccaggcgtttatggtgtccattaatgcgttcgtcagccaggcaaaggagcgacaggaggaagtggtgcgggtggtcggcatcaaaatcctggcgcggctggtgcagatgtcgcctgtcggcaatccagagctttgggcggtgaaccagacggcggcggcctataacgcggcggtctccgagcataacagtctgctgcggcaaaacccggacaacctgactaaagcaggccggctgcggccaggccgtaaagttaaggacggcatggacctgaaagcgccgccgggctatacgggcgggcgttttcgcggtaactggcaggtctcctttgatgcgcgcactaccgacgaaacggggcgggttgataaagctggccatctgacgatggctgccggaaatgtcactcttggcctgtttaaggtcggtgtgcgcgatatctacttctgcaataacgtcccgtactcataccgtctggagatggggcattccagccaggcgcctggcggcatggtgcgcatcaccgcggcagagttccagcggtatttcagccaggcagtcagcgaggttaaaaatgataccggacatcacaacggcgcttga

SEQ ID NO: 594 - DNA, 483 bp, Kosakonia cowanii
  source 1..483: mol_type = genomic DNA
atgatcattaccgatatcacttcaccggccatgaacagctatgcaggcgagggggatttgaaagcttttgccgatctgcgcgatatcacgctaccggaaaagatcgcgccattgctcatccgggcgatggattacctcgaggggctggactgggccggctggcgaagcgaaccaaagcagccgctggcgtggccgcgtgcgggcatcgaactggacggatacgaactgcccgccggagaggtaccgcgtctggttgttactgcgcaatgcatgctggcggtcgaggcgatggatggcgatctgctgggcagtgtgcgagaagcagctgtgaagtccgaccgcgtggagggagccgtaaccacgacttatgccgtcgctgacggcgaagtgttcataccgtcttacccggcggtgatggctttgctcggcgagctggctggtggtcgtggctatgcagtaaacgcttttgcggagcgtgcgtaa

SEQ ID NO: 595 - DNA, 312 bp, Kosakonia cowanii
  source 1..312: mol_type = genomic DNA
atggccactaaatttcagctccagcccaaaccgactttcaaagcagacgtcaacattccgcgcgccggcgaagatgatggcgtacttacgtttaccttccgtcataaaccggtcaaagaacttgctgcactcgaagaaatcgagggaaaaacggctatcgacttcctgactgaaatcaccgagtcctgggcactaccggatgagttcagtcgtgaaaatctggagatgctcctggataactaccctggtgcgatgaaagcgatcgtcggcacctactatcgggagctgacaggtaaccgcgaaaaaaactga

SEQ ID NO: 596 - DNA, 411 bp, Kosakonia cowanii
  source 1..411: mol_type = genomic DNA
atgataccggacatcacaacggcgcttgagtccatgctgggtctgtgggcagatggcgagggcgtgcgggtgacatgggataacattcaattcgacccgcctggcgacgggctgtatctgatctcccatgatatgcctgcgcagccgtacagcattgatatggccgggggctgccgggtctaccccggcgtgtatcaggtcaccgtcgtcgcgccagcgggtggcggcaaatcacaggccagagcgctggcccaccgcgtcgccgggttgttcccggagaaccaggagatctcaggtgacggctttaccgcctgggtgacatcaccgcccgccatttaccccggcatagcggacggcgtgtcctactccatccccgtcagcatcaactaccgggctgatatctcagcttga

SEQ ID NO: 597 - DNA, 774 bp, Kosakonia cowanii
  source 1..774: mol_type = genomic DNA
atgttaatccgaaatatgctcctgaaatactacgcaccagaagatgatggccagggcggcgggggcggcggcggtaccgaaattacgccagaaattcagaagctgattgatgatcaggtcgctgcccaggtctccggcctgaaaaccaaaaactccgagctgctgggcaccatcaagcagcagaaagacaatctgtctcgctttgacggtatcgacccagatgcggtgcgcggcatcctgcagcgattttctgacgacgaagaggcaaagctgattgccgccgggaaaattgatgaggtgctggataaacgcaccgagcgcctgcgcgctgatgttgataagcagatcaaagcggccaatgaacgcgcggataaagccgaagcgttctccggcaaattccgggatcgcgttctcggcgatgccattcgggcggcagcgtcaaaagctggcgcactggcggaagcatccgatgacctgatcctgcgtgccaaaggcacattccagctcaacgacgaaggcgaggccgtagcagttgatgcaaatggcgacgttctgttcggtaaggacggcaagaccccactaagcccgcttgaatgggcggagtcgctcaaggagacggccccgcacctgttcccgcgcgctgaaggtaccggcgcgggtggacacaagccaggcggtggtggcagtcagaaacgttcagagatgagcgccagcgataaggcggagtatatccgcaagcatggccagcaggccttcctcaaacttccgaaataa

SEQ ID NO: 598 - DNA, 1407 bp, Kosakonia cowanii
  source 1..1407: mol_type = genomic DNA
atggctaataacgacatcacctgggttcgtcctgaacaccgggcggccagtgctgcctggaagaaaatcagggacttttgcaaaggggctgaggcggtaaaagaaccgggcaacaactatctgcctttgcttgactccacagacaagagcatgcgcaaccgcaagcgcaacgaagactacctgcagcgggcggtcttctatgcgattactggtaataccaagattggcctcctcgggctggcctttcgaaaggatccgaccttttccgcgtcggagaaactgagctatctgctgaagaacgccgacggcgctggcaccagcatttaccagcagtcgcagctggtgaccgagaacgtgctggaggtggcccgtgacgggctttatgtcgattacgctgagggcagtggccaggccattatcctgcgttatctggccgagaacatcatcaactggcgcacgaagcgcatcaacgggcgcgatcagttggtgctggtggtgttgagggaatgtgtggagcaggaggatggctacgcatttaaggatgaggtccagtatcgcgagcttgcgcttgaagagggccggttcatctgccgggtgtggcgccgcagcgcggatgccggttccgctgcatacgttgttaccagtgaataccagccgaagcccaaaggcaaagacagctgggacgaaatcccgtttaccttcgtcggcgcgcagaacaacgatccgactatcgacgactcaccactcgccgcgctggtggagataaaccatggtcacttccggaacagtgctgattacgaagacagcgtgtggttctgcggccaggtccagccctacatgacgggacttgatgaaggatggcgcgatcatctggaaaagaagggggttaaaatcggctcccgctcgccgctgctgctgcccagagagggcaactttggttatgcccaggcgcaacccaacatgctggcgaaagaggctatggacagtaagcgcgactacatggtgcaactgggagcccggctcatcgagcagaacgcggcggtgaaaaccgcaacgcagtccagcagcgaggagacatcgtccacttctgtactggggatctgcgtctcgaacgtatcggaggcctattcactggccatcggctggtgtgcgaaatatctgggcgtcggagagcagcaggcggcctacgcgatcaaccaggagttcattgctaaggtcgccgagtccggcatggttaccgccattgtgaacgcctggcagtccggtgcaatccgcgacactgatatgattcgtgcgctgcagaagcttgacctcatcaacccagcagacagccccgacgatatcattgacgaactgcacaaccccacccccaccctgattggcggtaacaatggcaacggtaaatga

SEQ ID NO: 599 - DNA, 1311 bp, Kosakonia cowanii
  source 1..1311: mol_type = genomic DNA
atgacggggatatcgccgacccttaacgtaccgcaggcgcagtttctggcgatgccgcataaattcaaggcctacgtggcgggcttcggttccggtaagacgtgggtgggctgtggcggcatctgcaaggggatgtgggaacatcccaaaatcaaccagggctacttcgctccgacctatccgcaaatccgcgacatcttctatccgacagtggaggaagtggcgttcgactggggccttaaggtccagatcaacgaaagcaacaaagaggtccatttctacgccgggaggcagtaccgtggcaccaccatctgccgctcaatggagaaaccggccacgattgtcggctttaaaatcggcaacgcgctggtggatgagctcgacgttatgcccgccctcaaagcgcagcaggcctggcggaaaatcatcgcccgtatgcgctataaggtcgctggactgcgtaacggcattgacgttaccaccacaccggaagggtataagttcgtttatcagcagttcgttaaggcagtgcgcgataagcctgagctggcaaccctgtatggacttgtgcaggcttccacgtttgataatgaagcgaacctgcctgatgactatattccctcgctactggcgagctatccaccagagctgataaaagcctacctgcgcgggcatttcactaacctgacaagcggcaccatttaccaccagttcgatcgcaggctgaacaactgcacagatgaagagcagccgggcgagccgctgtttatcggcatggacttcaacgtcggtaagatggcagccatcgttcatgtgaagcgtgaagggttgccgcgcgcggtgcgggagttggtgaaggtctatgacactccggcgatgatcaaacgcattcaggaagagttctggcgctatgagggcggccgctacgttgccagccgccagatatacatatatccggatgcctccggcgacagccgcaaatccaactgcgccagcctgaccgatattgcccagcttagagaagcggggttcagcgtcattgttaacgcttccaatccgccggtgaaagatcgtattaactcgatgaacgccatgttctgtaatgcgttgggcgaacggcgttacctggttaatgtccagcgctgcccggtctatacggaaagtcttgagcagcaggtatgggataaaaacggcgagccggacaaaaaggcagataacgatcaccccaacgatggtggcgggtatttcattgtgaaggattaccccatcgtcaaacctgcatactcaatcactatggataccaccttctga

SEQ ID NO: 600 - DNA, 963 bp, Kosakonia cowanii
  source 1..963: mol_type = genomic DNA
atggagaaccagagaaccggtttcatcccgttgtaccggagtgtgcttaagcaatcctggtcgaaggacgtcttcctgcgcacgctgtgggaaaacctgctgttgtcagccgcccgtcagccttacacagcaaacttcaagggtcgccaatggccgctgctaaccggacaactggtaaccacctcagccgatttaggcctgagtttatgcgacagggaagggaagccatgcagtcgccacgccgtagacaggatgctggaggttttcgagcgtgaagggatgatttctcgctcaggagagaagagaaaaggctctgtgataactatcacaaattatgctgaatatgctcaaaaaatggacgatttacccgcgcattaccccgagcatatctccgcgcttaatgccgagcatggcgaagccagtaatggtgaggcttccgatggtggtgccgcgcataagaccgagcatttagccgagcgtttccccgagaatcatgaacaacaaagtaataacaacaataaaaacattaaaagatctacgtccgagaattctggcggatcctctgacaagcccggtaagaaattacctgttctgaaacctgatgctgcaatccagagcggcggtaagtggggaacctctgaagacctccgctgcgctgagtggcttttcagtgaagtacaacgcatcgcaccatcagccaaacagcccacctgggcatcatgggctaacgatattcgcctgatgcgagagagagacgggagaacccacaaagaaatatctcaactcttcaggtgggcctgcaacgacagcttctggcagggaaatgttctctgcccggcaacgcttcgtgagaagtggacccagctcgatatcaagcgcaataagcaaccggccggttcggcttctgtcaagccaaaaattgacgtgaataacactgactggatccacggggtgaaactatga

SEQ ID NO: 601 - DNA, 954 bp, Kosakonia cowanii
  source 1..954: mol_type = genomic DNA
atggctacaactgttaataacgatctggtcatctatgacgatctggcgcagaccgctttcctcgagcgccgccaggacaatctggaagtgttcaacacttcctccaacggcgcgatcctgctggacaatgagctcattgaaggcgacttccgcaagcgcgccttctacaaagtaggtggctccatcgaatcgcgtgatgtgagctccactggcaaggtgaatggtaaaaaaatcggtgccggtgaggcggtgtctgttaaggcaccgtggaaatacggtccgtacgaaaccactgaggaagcctttaaacgccgtggccgcacggttgacgagttctccgaagtgattggcgttgatgtggctgacgctaccctggaaggctacgtgaaatatggcctgaaggcgctgacggcggcaatcggagcaaacaccgatatggtggtgaccgccgatatcgaaaccgacgggaagaaaactctgacgcgcggcctgcgcaaatacggtgacaaattcaaccgcgtagtgctgttcgttatgcactccgccacctacttcgacattgtggacgaggcgatcgccagcaagatatacgaagaagcgggcgtggtggtgtacggcggccagccgggtaccttgggtaagcccgtgctggtgaccgataccatggatgccgccgctattcttgggctggtggccggtgcggtgaccgtgactgaatcccaggcgccgggcttccgctcctacgacatcaacgatcaggaaaaccttgcggtcggctatcgcgcggaaggtacagtcaacgttgagttgctgggctacagctgggacacggcgaaaggcgagaacccggatctgaccgccatcggcacggccggtaactggaaaaagcatttcacgagcaacaaatccactgcgggtgtgctgatcaagctgggggccgcatcgggggagtaa

SEQ ID NO: 602 - DNA, 1086 bp, Kosakonia cowanii
  source 1..1086: mol_type = genomic DNA
atggcaacggtaaatgaaacgttacgtgacgaagccatagcccacaccgtctggatcagtcgttatagcactggtgtggcaaaccgcatggttaagctgctgaacgacagcgacgctgagcttaccgcacggctgctgttggcgatggacagcctgcccaccagtcagtttacggtcagccgactggaaagcatgctggggagcgtacgcgagcttaaccagcaggcaatagcgggcatgcagaccagcctgacggatgagctcctgctgctggccgggcatgaagcaggctatcaactgagcctgtttgattcactgctgccgcagcgggtgaaagagcggtacccgctgcagagcatcacgcctgagcagctttacgcggccgccatggcccagccctttcagggacgtctgttgagcgaatgggccgataaccttgaagccgaccgcatggcacgcgttgttaatgcagtgcgtcgcggctacctgcagggtgataccacggaaaccattgcccggcaggttcgcgggaacgccagcaaaggctataaggacggggcgctgcagctcagccggaccaatgccgccagcattaccaaaacggctgtgaatcacctcgcagccacggcgcggactaattttgcagaagccaacggcgatgtcctgaaaggtaaacagtggctctccaccctggacaacaaaaccacgccgacgtgcatcatccgtgatcgcctccgttacactctggacaacaaacctgtcggtcacaaggttccgtatctgcaggggccggggaaaatccatttctgctgccgttccacggagacgctgattaccaaatcatggcgtgaactcgggatcgacagtaacgagctggatgaagatactcgcgccagcatggacgggcaggtgccagcggataccacatatcttgactggctggcccggcagtcgctgccgcgacaggatgagatcctcgggccggagcgggccgcgctttaccgcgctggcgagctgaagcttggggaaatgttcacagacaagggggaatggataagcctggcccgccttaaagcgctcagttga

SEQ ID NO: 603 - DNA, 606 bp, Kosakonia cowanii
  source 1..606: mol_type = genomic DNA
atgcgtaagccagcccgccgcaagtgcaacgtttgcaacgaatggttcattccggcctacgccaatatccgttggtgctgcccggagcatggcgcaatctacgctatggagctgcgcgccaaagagaaggtgaaagccgaggctaagcgcatcaaggctaaacacgaagctgataaagttgatcgcaaacgtcgcgctgcgcgtcgtaaggagctgaagccgatccgtcattgggtgcagatgactcagcgtgcattcaacgactggcggcgcgaaatgctgctggccgccggacacggatgcatctcttgcggtaccaaaaccgcttttgcctggcatgccgggcattaccgcaccacagccgccgcaccgcaacttcgctttaatccggacaatatatggctccagtgctccgcctgtaacgtccacaaatcaggcaacatcgaggcataccgggtcgctctggtcgagctgatcggcgaagagcgagtgctggcgctcgagtccaacaacgaaacccaccgatacacccgggaagaactgaacggcatccgcgccagggccagggcagatcttcgagtactgaaacagcaggaggccgcatga

SEQ ID NO: 604 - DNA, 687 bp, Kosakonia cowanii
  source 1..687: mol_type = genomic DNA
atgaaaagtcttgctgagcagatgcacaacttcgaccgcgagcagatgcgccgcttcgcgcacaatctgcctgaacagtatcaggaagagtcacctactgagcaggtagcacaaattattaacggagttttcacgcagctcctcgcggcattccccgcagcaatggctggtcgtagccaggatgagtttgatgagattcgccgtcagtgggttaaagcgtttgccgagaacgggataacagacatggaaactgttgatcggggtatgcgagttgcccgtcgccaggcaaaaccattcctcccgtcgccggggcaattcgtggcctggtgcaaggaagaggcgcgggcgttcggcatcaccgtagacgacgttatgaccgagttctggatgtggcgaaagatggttttccagtacccgagcagtgagcagtacccatggccgcagccggttctctatcacatctgcctggagctgcgccgccgcagtactgacggccagttaagccagaaagagctgcaaaacgccgctgccgatgtactggcctactgggaaaaacgagccgctgaggggcacccggttcctcctgtgcgccgcgccctgcaggcaccgaaggctgagcatggcccaaccccggcgcagatactcaaagcgcgctacgaacgcatgaagaatgacgggaatggatga

SEQ ID NO: 605 - DNA, 360 bp, Kosakonia cowanii
  source 1..360: mol_type = genomic DNA
atgaaacgtatgccggacaaagacgctggtttctgggcaggtcttatcgcctggctatacagccataaaacagaatggggatatgcgggcgtagcgggcatgttttctctgctgcgcagcgcctatgcacagtcctcatggagtaagcgtgttctcgacgctgtatcgtgcagcgcgctggcattcttcgccgcgccgacgcttcaggttgtcggtggtgttcttaactggaatgtgcctgatacagccgctcaggtttttgcggtctacatcggttatgtcggcaatgactacatcagcgagaagctgcgcggctggattaaccgcagaacgggagataacagtgaaaatcagtcctga

SEQ ID NO: 606 - DNA, 901 bp, Kosakonia cowanii
  source 1..901: mol_type = genomic DNA
gcttctggatcgacgcaagacggcgcccgacaagtacacgcaggaaaattacgagcgcgacctggcaagtctgcaggaggcggaaagcaaatatcgcgacacggtgctagagaactacgacaagatctccgacgcgcaagctgactggcgaaaaggagcgacagccggattcaaaaactacctggaatctgccagggatctatctgggcaggcaaaatcgctggtgacgggcgcgttcggagaaatggaagactccctggtcaacttcgccatgacgggaaagctgtctttcgccgatttcaccaagtcgataatttccgatatggcgcggatcgcatcccgccaggccagttctgcactgttgaatagcctggtaggcgccgcgagtacctactttaccggtggtggtggaggtaacgggctggcagcgggatccgctggcgccgtgtcctcggatttgggggcgtcacaagctggatattccagcacgtattttccgcaggccgatggaggcgcatgggcgggcggagtgcagatgtttgccaacggtggagccttcgccaacggcgtggtcaacacgccaaccgctttcgggatggctggcggccaaaccggcgttatgggtgaggccgggccagaggcgataatgccgctaaccagaaccgccggtgggcaactgggtgttcgggcactcaatgggggcggttcaggcacttctattagcatcagcgctccggtaacggtcatcacacaggacaggagcaatgagggcatgcagatcgatcagcaggctctggccaaaggccttcaaacgcagatcaaggccacagcggaaaaggtggtcgccgattcctggtatccgggcggcatcagcttcaggcactcacaggggagagcgtaa

SEQ ID NO: 607 - DNA, 1467 bp, Kosakonia cowanii
  source 1..1467: mol_type = genomic DNA
atgttttccctgaatacacttgcaatggttgtgggtgcctgcatcctgacgggttgtaccgtcggaccggactattatcgccctgaggtgcccattgcgaagcattaccacgctcagccggctttacagcagcccactacatccgaatccgccagtttttcaatctggtgggaaaactttggcgatccgctgttaagtcggttcgtttcagatgcacttacgcaaaatcttgacctcgcccaggcatccgccaggatgatgcaggcacaagccgggctgggagcggcaacggcggcgctgcttccctcgggaaatatcagcgggcaagctgcacgtgcttatcagtcggttgaaacaccgttgggtcaggtgcttagttcaacgccggattataatcgctacggcagttcgtatgaaacggatctcaatgcaggctgggagatagacctgtttggtggtctgagacgaggtcgtcaggctgctctggccgattatcaggcttctgaggccggtgtagcggcgacacgtcttgctgtcgcagcacagactgcagatatctatatcaccctgcgtggattacagtcccgtctggatattgcgaataaacaggtcattacacagcaactgctgctggaaaaagttcagctattgcacagcaaagggctggcatcagaatatcaggttcgccagacagaaggcgcactggcacaggtgaaggcaacggtaccggttctgaacaacggacttgatggcgccatgaatgcgctggacgtcatgctgggtacgcctccaggaacgcatcatgcgcaactggcttcaccgggggcaattcctcatacacccgcaatcaccgcaatgggcacccctgctgacctgcttcgccgcaggcccgatattattgtggcagagcgccatctggccgcatcaagcgcccgtatcggtgtggctgtcagcgagtattatccaaaattttcccttaacgcgttgcttggcagcgcaacggcagtgtcaggggataatcttttcactgccggtgccagccagtcggcaggtgtgctggggttacgctggcggctttttgactttggtcgtattaacgcccagataaaccaggcaacaggccaggaagctgaggctctcgcggcttatcgtctgtcagtcttacgcgcaacagaagatgtagaaaacgccttctcggcactggtcaatcgccagacgcaggctgccacactgaccagcggtgaaaccgccctggccagcgcgcgacagtcttcttttatcgcttttcagcaaggtacagccagtctgattgacgtactgcataacgatgaaacgcttctccaggcctcggatgcaagagcgcaggcgcagacagaatctgcccgtgcagccgtggcagcattcagggcgctgggcggtggctggcaatctacattgtctggagaaatggcaaatacgccgggataa

SEQ ID NO: 608 - DNA, 348 bp, Kosakonia cowanii
  source 1..348: mol_type = genomic DNA
atgaaccttcctgaatctgtcgggccggtgccggttgtccgcacacctgacggctactggtgccaccccgcactgactgcattttaccgtgaccgggactgtgtcccgcaggctgaatatgaccactggctggcggacaacggcctggaagacacgctggtctgtatggataccgatgatgacacgccggcggcgcaggcatatgcccgcaacgccgatatttcatactggacgccgcccgtacctgcaggtgagggctggtttaccggcgcgatattcgacagtgaggatgacggtcccgcctgtatctggctgcgccgccgggaggtgccatgcgacgcaggctga

SEQ ID NO: 609 - DNA, 1192 bp, Kosakonia cowanii
  source 1..1192: mol_type = genomic DNA
atgagcattgtcccgatcaacatcggtggaggcgctaacgacggggcaggtcagagtctccgctcgggcggggagaccatcaattccaattttgcagaactcgatgttcggacaactgctgcacagctggccgctgataaagcgggtgagacagcctcgctcgctggggaagcagcaacggacgccagagccagagctgacgcagcccaggcgaaggctgacgcagtcgctgccgaaaaaggacaacccaatgggattgccactttggatgacagcggcatcgtccctgccagtcagttgcccagttacgtcgatgatgtactggagttcgaaagcgagtccgcttttccagctacaggcgaaacagggaaaatctatgtcgccgctgactccaatgatcagtaccgctggagcggcacccaatacattctcctctccgcatcgcccggctcgactgatgcagtcccggagggtagcgtcaataaatattggaccaatgccagaaccgttgcgagcgtgctcaccggactcctcacgacaaacccggctgtggtggctgcaacagacactatccttgccgccataggaaagctgcaacggcaaatcagcgatgcagtagcctcgctcgggaataaggccgcgaaaggggccaatagcgatatcacctcgttatcaggactaaccacggcgctttcgattgcccagggcggtacaggggcgactacgctcgcagccgctcaagctgcacttgggatcaactcagcgatcaaccttcctaccgggacgaaccttaacaatattcaggccacgggcttctacatgcagcaggcgaacgctaacgcgacgttggccctgaattaccctgtcgcagccgcaggatcacttatcagcgtgcagctcggaagcagcatcaccactcagacgtacaccgtgtacaacactggtgagcaatacgtgcggtccaggtacgtagctgcctggagcgattggagattgaccatcactgacgcgactgtgaaatttgcctatgcctacccgcacggcggaacagaagcagctcccgcaacggtgacaatcaacagccgttacacggtagccaacccgttccctgggcacgaggtgatcgtacaggcggagatcctgataggaggcaagtggggcgatgctggttggttctacagctctggcggct

SEQ ID NO: 610 - DNA, 661 bp, Kosakonia cowanii
  source 1..661: mol_type = genomic DNA
atgaacaaagcaaacagagcggcgatcgaggcacacgccatcgacgagtatccgcgcgaggcgtgtgggctgttggtgagggtaagtcgtaaagagatctacattccatgccgcaacatcgcctcgacgccgaacgagcatttccgcttggcgcccgaggattacgcagccgctgaggacaggggagaaattctcgccgttgtacacagccaccccgattacccggccaccccgagtgaggctgatcgcgtgtcttgcgaggcgtcgggcttgctctggcacattctcgaagtgcgaaaagacgatgacgatgtagtgcgagctgggaatttggtgagcttcgcgccggttgggtatcaggcacctctgattggccgcaagtttgtgcacggtgtgcatgattgtctcagcatcatcctggatttttaccgtcgggagatgggtatcgatcttggcagctatgagcgggaagacggttggtgggataagggaggtaatctctatctcgaaaatttgcccgcggctggcttcgaaaaagtacccgcaccacagcatggcgacatcgtgctgatgcagatccgttcaccggtgccgaaccatgcggggatatacctggccgacggtgtactgaggagtgagccagagcactacccggcgcccg

SEQ ID NO: 611 - DNA, 333 bp, Kosakonia cowanii
  source 1..333: mol_type = genomic DNA
atggaaactttcacctgggctccggataaagagccttccggtacggtgagttttcgccgcaagtcagcaaaatttggcgacggatacgagcaggtcgctgaggacgggatgaacaataaaacccagtcttggccgctgacattcaccggaccaaagtcacggatcgctgagatcaaggcattcctggatgcgcataaaggcgctacggcttttagctggacggagcctttcggggaatcattgctggtccggtgcagcgagtatcaacctcgacatgcaggcggtggtgtttaccggttggccgcaacttttgaacaggcatttcacccatga

SEQ ID NO: 612 - DNA, 2878 bp, Kosakonia cowanii
  source 1..2878: mol_type = genomic DNA
tgtccgcgcagaaaaagccgctgagggtgttgccaagggcgcggacaaggcatcggaatcgatcaagaagcagaaggatgagctgagcgagctcctcggcgagattgatccgacggtgaaggccctaggacggctggacgagcttgaaagcaggctagcgaagcagaagaagctcggcgcgctcgatgcagccacctttagcgagtatcaggccaagattgagcagtctcgggcgagcctcgggggcttcgacgactcgctcactcgcaccggtaacacggctaagcagacggctgctgcgttgcgtggagtccctgctcaattcactgatatcgtcgtgtcgctccagggcggtcagtctccgatgactgtcctgctccagcaaggcggccaactcaaggatatgttcggcggcattggtcccgccgcgcgagccctaggcggatacatccttggccttgttaatcccttcacggttgccgctgcggctgttgctaccctcggatacgccttcgtttcaggcagtgaagaggcggtcgagtttcagaaatcgatcatccttaccggaaacgctgcgggcacttcggctgacactctgtccaacatggcgcaacaggtggccgcaaccgtcggcacaactggcgcagcgtcggaggtactggcaaagcttgctagcagcggcaagattgcgagcagcagttttgaaggggttgcgaccgcggcgctggaaatggaaaaggccactggccgggccgtggaggaaacgatcgccgagttcgtgaagatcggaaaagacccagtcgcagccgcgaaagagctcaacgatcaatacaacttcctgacggcaacgacgtatgcgcaaatcgtcgcgctgaaagagcagggcgacactatcggcgcggccaaactgctgaccgacacctatgtcgataccatcaagagacgtagcagtgaggtcacggaaaacctctcaatctgggagcgtggatggaaaagcctaaagggagaaatctcggccacggctgatgccataaaaaacatcggacgtgatcagaccctggctagccagatcaccgaggcgcagcaacgtgtggcagcggcccagagtgccctaaatggcatgccggacgacaccgatgcccaggccaagctgaccaattcaaagctggaactggagtttctcatccagcagaagaacacccaggacgccatcgccaaagctcagggggtgagcgcacagagacagcgtgaaggcatcgacgcgagaatccgcgtgaaggctatcagtgactccagcctttccagcgaggagaagcgcaacgaccttatcaaggagtacaagcgggaggtcgaggcgctgcgcagggcaaaccccgacgacccgctggttcaggaagccgtcgtagcgaagacaatccagaatattcgggaccggaacaaagacccgaaaaccgcgacgtcgtccatcaacctcaccgacttcaacgactcgaaaaatcagctaacgctgatcctcagcgaatacaagagcgctcagagggagctggaagcagcgcagaaagccggcctgctcacacaggaagactatctgctcaagcgtaaagcccttatcggcaatgagcgggatgaggtaaccgcagcttaccaggcggagatcgcagctctcgaggcatcgaagagccaagccagcactacagccgcccagcgcattcagttggaccaaaaaattgccgatgccaaagccagcatgatcaaggcgcaaaaggaggctgacagcgagcttgaggtgattgcgacgaatgagcaggggaggcttgcgaagcaggcccaggccatcaaatcctataccgacgcgttggatcagcagaacgccgccctgcgccgtgctggaagccgtgccgcagacggagtcgggcttggcgaccgccaaaatgcgatcaatagcgagctgaacggcatcgctgatcgtgcgaatcagcaacgcttagatctggctcgagataaggccgaccaggcgcgaaacatgagcgctgaggaatacagagccaagctggacgcgatcaatcgaagcgaacgggagatgagcgaaaccgtgctcagcaactacgagcagttgtctgaagctcagggaaactggagaaacggcgcaacgtctgcgttcagcaactatctggacagcgcgcgtgatgtggctggacaaaccaaaagcctattcaccaatgcttttagctccatggaagatgctttggtcagcttcgccatgactgggaagctgtcgttctcggacttcgcaaaatcggtattggctgacatggctcgtatgactgccagagcggctacgtcctctgcgctcagttcgttgtttggcatcgctgcatccgctgttggctcctatttcggcagccctgcttctgccggctcgacgcaggctggttactccggtgatctgtcgggcttcactccgggaagcattcaggccaagggtggtgcgtggtctgggggcgtgcagatgtttgccgacggtggggctttcaccaattcggtagtcagcaagccgaccgccttcggtatggctggcggagagaccggaatcatgggggaggccgggccggaggcaatcatgccgctgaccaggacagcaggtggcaagctcgccgtgatggcggtaggtcgcggccagaactccagcaccaaccaggtggtaattcagcagaacatcgccgtgccggatgggcagggtgctggaggcgctgatgagaccaccagtcaggccgttgcccaagcttacgcccgggcggccaagcagggcgctcaagagcaaattgctcgcgacttgaggcctggcggccaaatctggcaagccatcaacaaacggtaa

SEQ ID NO: 613 - DNA, 650 bp, Kosakonia cowanii
  source 1..650: mol_type = genomic DNA
ctggcgcttgggtggagctttttgagctcgatgcaacgatgctgggcgccgagctttaccgcttccatggctacccacagcaatcctcgatattttggcagggcaaagagtattcgccttggccgatcaaagctgaaggcttcgagatgacggggcaggggacgcaaccgacgccgactctttccgtgggcaacgttggcggctttatcactgcgctggttttgtatttcgaagatctcgtcggcgcgaaactgattcgccatcgaaccttgggcaagtatctcgatgggcagcccgaagcggacccagaggaagaactgccaccagatatttggtatgtcgagcgcaaggctgccgaggacaacgaagtcgtccagttcgaactggcgacggccttggatttcgctggagttcaactgcctcggcgacagatcgtagccaatgtgtgctggtggctttcctgtggcgggtaccgaggtccatattgcggctataacgggccacctgtcgcggacgagaacgatgtcatcgtcactgacgccgccaaggataagtgcggcggtcgcctgactagctgcaagctacgtttcggcgaaaataaccccctcccatatggctcattccccgctgcggggttgctccggacatga

SEQ ID NO: 614 - DNA, 189 bp, Kosakonia cowanii
  source 1..189: mol_type = genomic DNA
atgtacgagccgaggccatccgaggcagccctggcagccttcggcatgacgttagacgacattcccgagactgagtacgaggtctggccggacaactggcgggctttcctgctgttcgaggcaatgtcgactcagtggcggacaggaatgggcggagcctctggcttggactacagcgcactcccgcca

SEQ ID NO: 615 - DNA, 654 bp, Kosakonia cowanii
  source 1..654: mol_type = genomic DNA
atgagcgccattctccccaacggctccatccttgaaattgctgccacattcagcccaccgactccagtgaccgccatcagtaacgctaaccctgcggtggcaaatgccgctgcgcacggtctgtcaaatggcgacattctggtggttacttcgggttggactcgcctgaacgacaaggttgttcgtgtcgccggctctgatgccggctcgttcgaactggaaggcatcaacaccaccaacaccacggtgtataccgctggagcgggggcaggggctgtccgtgctgcgagtggttgggcgcaaatcagccaagtcaccgacagcaacagctctggcggtgaacagcagttcaccaccttcggcttccttgaagagtcggacgaccgtcaactgccgacaacgaagtctccgatcagcatggctatcaccgttgctgatgacccatcgcttccttatgttgcggtttgtgaggcggctgatgaagatcgcgagcctcgcgttgtgcggctgactttgcccaatggctccgtcatctactaccacgcatacgtgtcgatcacgtctactccgacgttgtcccggaacagcatcatgacccggactgtcacgctgtctctggccgctcgcccaacccgatacgctgcgacggtgtaa

SEQ ID NO: 616 - DNA, 341 bp, Kosakonia cowanii
  source 1..341: mol_type = genomic DNA
ctagccttcgcgagatcatcattgaaatcggtaactcgctgattcgaatgtctccggtagataccgggcgattccgtggtaattggcagatgtccatcgatgcgccatcggaagggacgctaggagcgcttgatccgaccggtgcgacagctacggcacgcatcgcagaaggatcgattttcttccgggcaggaaccaccgcgttcatcgtgaacaatttgccttatgcgataccgctagagtacggccattccgaccaagctccggggggaatggtgcgaatcactcaggcgcgtttccagcaaattgtcctggaggccatcaggaaccataaattatga

SEQ ID NO: 617 - DNA, 391 bp, Kosakonia cowanii
  source 1..391: mol_type = genomic DNA
ccccgcgcaagaagcactgcttcgccgggccgccttggagatgaatggcatggcctggaaagggcagaagatgtctagcgatcaggccctggcgtggccgcgccggggtattcaactggattgtgagatcaagccgaacgactaccttccggcgcgcattccttacggccaaatggctctcgcagcggagattcatcgcgacgacatcgatcctatcgagacgcgcaagggcgcggttattcgggagcgggtcgaaggcgccgtcgagactgagtacgcgacgatttctaataccagcggcaggctgcttccggctgctccggataggccaagccgcacgcaatttgcggactaccttctcaaacgtgggttgttcgcagtaagggcttag

SEQ ID NO: 618 - DNA, 333 bp, Kosakonia cowanii
  source 1..333: mol_type = genomic DNA
atgactcgcgctgttgtgccccacatgcggcgccagggcagcggtcgcatcatcaacatcggttcgatcctcggcgtcgtggccgtgccttatgtggcgctctacgtcgcgagcaaacatgcggtagatggctattctcaagccctggaccacgaactgcgcacccatggcatccgggtcactgtgatcgaacccggctatacccggacctcgttcgaaagcaacagcctggaggctgacgccaagctggacctgtacgaagatattcgcgtaaaggtcaccaaagtcgtcaaccaggcgatggcgaccgccgaaagcgcagatgtggtggct

SEQ ID NO: 619 - DNA, 507 bp, Kosakonia cowanii
  source 1..507: mol_type = genomic DNA
atgcgaatgaatgccaaagagctgatcgccgacgccagagtgacagcccctactctgccaccagcagcagcaaagttaatgaccgcaatggctgaccgcctcgatctacagttcgtggtgctgtgcgaatcgcggaacgaggcaaagcagctggctggagagaatgctctgatgaagtcggctattaaaactcacagcgaatcagtccatttctgcgtgggttgtggaaaagatgatccatgcagcaatgacgatgtttgctatgcgctcgaagaaactccagccaccgacgccatcctcgcctccctgcgcgcagaaggggtggatatggcaatggaagcagcgaagccggaagtggctaacgagttccagcgcgagacttttgatcaatgcgtgacagcggctgtgaaataccctcaaagcgatctggctggcaaggttgaaatggtcgcttggcttgaattgttcgcagcccagctccgcagcaaatcggaggtgcagtcgtga

SEQ ID NO: 620 - DNA, 639 bp, Kosakonia cowanii
  source 1..639: mol_type = genomic DNA
atgatttacacaactggctccatcgcggtcagcggcaacgcgctgaccggcaccggcacgaatttcaccgcagcaggctctcttatccgtaacggctgcacggtgctggcactgaccagcccggcgcaggccttccagatcaccgccatcgacagcgcgaccagcctcacggtgaccccgacggccagcccggcgattcccgccggcacgaagttcgccattctgctgagcgacagcctttccgttgacggcctggcgcaggatatcgccgagactctcaccatgtaccagcgttatatggggggctttgctgacgtgatgaacgggtccggcgatgtgaccatcaccatcaacggtcagcccgttaccgtacccggtcagaagtcgctggctaagaaaggggctaacagcgatatcacctccctcagcggactgaccactgcgctcagcatcgcgcagggcgggacgggcgcaaaggatgctgccggggcgcgtgcagcgtttgatctggacaatctgtatctgcggggagaccggaacctttcggacgtcaaaagcaaaaagaccgcgcgcgataacctgggcgtcaatgccagcccgaatatgtggtacgtgtggcaaaacccgaatgccacctca

SEQ ID NO: 621 - DNA, 639 bp, Kosakonia cowanii
  source 1..639: mol_type = genomic DNA
atgatttacacaactggctccatcgcggtcagcggcaacacgctgaccggcaccggcacgaatttcaccgcagcaggctctcttatccgtaacggctgcacggtgctggctctgaccagcccggcgcaggcgttccagatcaccgccatcgacagcgcgaccagcctcacggtgacgccggcggccagcccggcgattcccgccggtacgaagttcgccattctgctgagcgacagcctttccgttgacggcctggcgcaggatatcgccgagacgctcaccatgtaccagcgttatatggggggctttgctgacgtgatgaacgggtccggcgatgtgaccatcaccatcaacggtcagcccgttaccgtacctggtcagaaatcgctggcaaagaaaggcgccaacagcgatatcacctccctcagcgggctcaccactgcgctcagcatcgcgcagggcggaaccggcgcaaaggatgctgccggggtgcgtgcggcgtttgatctggacaatctgtatctgcggggagaccggaacctttcggacgtcaaaagcaaaaagaccgcgcgcgataacctgggcgtcaatgccagcccgaatatgtggtacgtgtggcaaaacccgaatgccacctca

SEQ ID NO: 622 - DNA, 711 bp, Kosakonia cowanii
  source 1..711: mol_type = genomic DNA
atgcgggacaagacaatcagcgcgattctggcgcatgcggcgcaggcgttcccggctgaatgctgcggtgtggtgatccagaagggacgggttgagaagtatgtcgcctgtcgcaatctggccacctccccggaggagcagtttgaactgtcaccggaggattacgcggcagccgaagagcagggcacggtggttgccgtggtgcacagccacccaggcgacggcgccacaacgcagccgagtgaactcgacatgctgatgtgcgacgcgaccgaagtgccgtgggtgatcgcgtcatggcctgaaggcgatatccgcaccatcatgccgcgcggcgatcgcccgctgaccgggcgtcagtttgttctcgggcatgctgactgctggtcccttatccgggattacttccgcactgaacacggtatcgcgctgcccgactacagcgtcgatcgtcactggtgggaggagggcgaaaatctctatatggataactggcacgactgcggattcagggagttcgacggcccctcccggcccggcgatatggtcatcatgcaggtgcaggccagcgtgccaaatcatgccggcgtcctgctggaaggtaatatgctgctgcaccacctgtacgggcagctcagccagcgcatcccgtatggcggctattaccgtgaccgcaccatcaaagttttacgctacaaggatctgatgtaa

SEQ ID NO: 623 - DNA, 339 bp, Kosakonia cowanii
  source 1..339: mol_type = genomic DNA
atggcagttgagaccttctcctggtgcccgaaggtggcggcacaggctgataccagtttccgcacccgcaaagctcagttcggggataattatgcacaggtggccggggacggcatcaacccggtcacaccgcaatggagcgtgagttttaccggcgatgaagcctatgtcctggccattaaggcgtttctgaagcggcatgccggctggaagtccttcatctggaaaccgcccctggagcctgcggggctgtggcggtctgaatccctccagatagccacccacggcaatgacaaatacaccctcagcaccacattcattcaggcataccacccatga

SEQ ID NO: 624 - DNA, 3492 bp, Kosakonia cowanii
  source 1..3492: mol_type = genomic DNA
atggcgacgcttcgcgaacttattataaaaatttcggctgactccagttctttccagtctgagatcacccgcgcctctcgcatgggctcagactactacagaacaatgcaggcgggaggtcgccaggcagctgcagccgctaaagaaagtgaaagggcattatcagatctcactgatggatttgcctcggcaggtaaagctgccgcagccgctgcagcggcctttgcaacgggtaaaatcgtccagattgcagatgagtggaactcagttaatgctcgccttcaacaggcatcctcatcagctgacgattttgcgacatcgcagcggcagttgatggagatcagccagcgcacgggtacagcgttctctgataatgccaatcttttcgcccgcgcagctgcatcgatgcgcgaatacggctatagctcggaagaagtgctcaaaatcaccgaggccgtttcaaccggccttaaactatcgggtgccagtacagctgaggcaggttcagtaatcaatcagttcagtcaggcactcgcccagggcgtgctacgtggtgaggaattcaatacggtcaacgaatcgggtgatcgtgtcatccgtgcccttgccacaggcatgggcgtagcgcgcaaagatctcaaaagtatggccgaccagggaaagctcacgatcgataaagtggtgccagcattaatgagtcagctcggggcgttacagggtgagtttgcaacgatgccgcaaactgtttcaggctcattgcaaaaggtcactaactcgttcatggggtgggtaggtggtgttaacgccgcaacaggtgccacggatgcgctgtccggtgggcttgatggtgtagcccagacactggactcctttacttcatccgcggtgagcggtgctctgagtgatgtggccgacaatatgtcggttatcactaccgtagcaggcgcgctggtgggcgttggcctggctaagtatctcagcggaattgttaccagcgccacgagtgcgacaggtgctttgatctctgccgcgaaatcagaagttgccctcgctgtagcgcaagacaaggcagcccagtcagccgtggcggcttccagagctgacgtctatcgtgcacaacaagctttgcagagagcaaagggcgctgatgttcaggctgcgcaacaggaaaaaatagcagccgcagaggcaaaggtaacagcagcacaggctaggctcacgacggctctttccggaggtacagcaactgagaaagtcagggccagagcagcgcttgagcgtgctcaggctggtctggcagctgctaaaaatgcggacgtacaggcagttgctgaacgacgactggcacaggcagaggctgcgcgtgacaggaacctggccaaccgtgtctcgacccaaagtaatttaaacagtgtcaccgctgtcggatcgcggctcatgagtagtgctctgggtattatcggtggcattccagggctggtgatgcttggcgcaggggcgtggtatgcggcataccaaaatcaggagcaagcccgtcggtctgcacaggaatacggcaggacaattgatgaagtaagccagaagatcaagcaaatgtctttgcctgaagcttctgataatgcagataagtctaaaaaggcccttgatgaacagaacaggcttatcgatgagcaaaaaagcaaagttgaaagcctgaaaaagcagattgccggctcccagtatctgatcagtaatcccggcccgatgaccaaaggtggtttcatgataaaccatcttacatcccttaataccgtgaccgacgaattgtctatagctacaggtcagctttccgtcgaacaagaaagactcgcacaaatgcagggaaaagcggcctcaattcaaaagatccttgaggacattgagcgtcgccggaatgatggaattcgtgaacaggcctggcgtcagaatgctgcctatcagtctctgctgatgatgaacggtcagcatgaaaaatttaaccagttgctcgggctcggcaatcagttactgatggcccgtcaggggatgaccctggcacccctgcgtgttcctcaggctgaggcctcgcaggcacagacgcaggcgcttgaaaaaagccggcgcgagctggccctgtcccgcctgaaaggtgaggcaaaagagcgcgcacggcttggctatgctgctgatgatctcggtctgacggctgatccgcaattccagaccaaccggcttgagtacatcaataacgggcttgaagagtggcgcaataacgaggccaataagaagcagcccaaagggccaaaaacagacgaagaaaaggccgctgatgcttataaaaggatgatcaagcagcagaaggagcagatcgcccttcagggccagagcaccgaactcgccagggtaaaataccaggtggttgaaggtgaattttccaccctggacaaggcgcagaaggctgaactgatgcgcaacgctgcgttaatcgatcaggtcaaacttcgcgagcagctgcgtaattacgaggcgaatctggccgacagcaacgccagcgcccgggcggccaatgatgcgcagctcattggttacggtcagggcaccaggttccgtgagcggatgcaggagcagtttaatatccgtaaggagtttgagcagaagaataccgatctgctccggcagcggcaggccggtgatattgacgaaaccttctaccagcagggcctggcactcaacagacgctatctggaagagcgactgcgcgaccaggaagggtattacaccgcttccgatgcgcagcgcggtgactggttaacaggtatgtccgagggctatgcgaactgggtggacgaggcgaccgactacgccggtatggctgccgacgggatgaagcaggcgatgggcggggcggtgaccaccattactgacatgctcaacggcaatctcgacagctggaaagactggggcatgaacgtactgaaaattatcgagaccgttctcgttaatatgatggtggcgaatgccgcgagttctctcggctcactcttcagctttggcgcctcatctgcggcaacggccagcagcgggacggcaattcagagcgctgcctcaaacttcacctttaatgccaaaggcaatgtctacgactcaccttccctcagcgcatacagcggtggtgtctaccagaccccgcagttgtttgcctttgcgaaaggtgccggggtgtttggcgaggcaggtccggaggcgattatgccgctcacgcgtgcggcggatggttcgctcggcgttcgcgcagtcggcgcaccgcagttttccggcggtggcccgtccgtgtcgtttggcgatatcaacatcaacggcggtgcgcagtccacggcaggacagggggctgcagcaaccgccggcaggcaactcaaggatgcaatcgtaacggtgattaatgagcaggccagcatgccgggctcgccattatggcggcttttgaaaggagcgtaa

SEQ ID NO: 625 - DNA, 3762 bp, Kosakonia cowanii
  source 1..3762: mol_type = genomic DNA
atgaccacgacaattatcaaagggcgtaagggcggtggcacaaagacccgcaccccggtggaagccccggacagtattcagtcgatagccagagcgaaaatcctcgtcgcgctcggcgagggggagttcgccggcggcctggacgggcgcagcatttatcttggcgatgcgtcatcgtataccccgctccagaatgccgacggcagttacaactttaacaacgtaaaatatgaattccgttccggcactcaggaccagagctatattcagggatttccgggcgttgagaatgagctgcaggtcgcctacgaactcaaggctgccgtgccgtatgtccgctctgtctccaatacccagctttcagccctgcgcatccgcctgggctggccctcgctgctgaaccagaaagataacggcgataaagtgggtacgcgcgttgagtatgcgatcgacctgtccgtggatggcggcacatatgtgacggtggtcaacggcgctgtcgatgacaagaccaccaccctttatgagcgcagtcaccgtatcgacctgccaaaagccaccacgggctggcagctgcgtgtgcggcgaacaacgcctgactcaacgacggtgaatgttgtggacagtatgcgcgttgaggcggtcaccgagatcatcgatgcgaagctgcgttaccccaacacggcgctgctctacgtagaatttgatgcgaagcagttcccgaacggcatcccgcaggtcgtgtgcaatccgaaggggcgtattattcgcgtgcctgatacctacgatccggaaacgcgaacctactcgggcacctgggaaggcgggtttaaatgggcgtggaccgataacccggcgtggatttattacgatatcgtgctgaatgagcgattcggcctcggtcagaggattgatgcgacccagattgataaatgggagctgtaccgcatcgcgcagtactgcgatcagccggtaccggatggcaaaggcggcagcggtatggagccgcgctttcgctgcaacgtctacattcaggagcgcaatgacgcctggacggtgctgcgcgacctggccggtatcttccgcggcatgacctactggggcgacaacaagctgtatgtgctggccgatatgccccgcgatatctggcacatctataaccatgccagtgtggtcgacggtaagtttaccttcgccgatccgagcgaaaccacgcgcaacaccgccgcgctcgtgaactggtcggatccggcgaatcactacaaagacacgcccgaagtcgtttatgacaacgagttggccctgcgcttcgattacagccagctcgaaatgacggccatcggctgcacccggcagtcagaggcaaaccggcgcgggcgctgggcgttgctcacgaatggcattggtgaggtggtgaccttcagcacgggtatggatgttcctcctgtcggtgaggtgatcggcgtggccgcgaacgaactggccggcagggtgattggcggcagagtaagcgcggtcagcggtcgtaatatcacgctcgaccgtgccgcggatgtcagcgccggcaaccggctctttctcaacctgccgtcaggggtggcgcaggcccggaccgtgcaggcggttaacggcaatgtcgtcaccgtcaccactgcctacagtgaaacgcctgaagcggagtgctgctggggcgtggatgctgacgatctgtttattgcgctctttcgcgtaaccggcacccgtgacaacgatgacggcactttcgaggtaaccggcgcgacgtacagcccggatatttacgccgcggtcgataccggcgcgcggctcgatgaaaggccggtcagcgtcattccgcccggcgtgcaggcgccaccggaaaatatcgtcatcgacagctattcgacggtcagccagaacatagcgatcaccaccatgcgtgtggcctgggatgctgttaagggtgcaatcgcctacgaagccgagtggcgccgcgacagcggcaactgggtgagcgtcccccgcacgtcctctcttggtttcgaggtgccgggtatctacgctggacgttatctggtgcgggtgcgggcggtgaacgccagcgatgtctcgtccatatgggcgacctctgccgaagtgacactcaccgggaaagtgggtaatccgtcgaaaccggtaggcttcaccgcctcggaaacggttgtgtttggcgtcgagctgaactggggattcccggcgaacacggacgacacgctgaagacggagatccagtacagcctgaccggcagcgatgacgatgccatgctgctggccgacgtgccttacccgctgcgcaagtatcagcagatggggctcaaggcaggtcaggttttctggtaccgcgcgcagctggtggaccggaccggtaacgagtccggctataccagctgggtacgcggccagtccagctccgatgtgaccgatattacagaggccgtgctcgcgcagatcaaggatacggagcttttcaaagacctcatcgagaacgctgtggacagcagtgcgaaggttgcggaactggccgaggcagtgaagcagaacgccgatggcctggctgcggcggcaggcgcaaaccgccagacagcagaagccattatcggcaatgccctggcgatcgcggatgttgctgtccggcagtcagcccagcatggcgctaactcggcgcggttcgaacaactgcgcgaggttattgccaccgaaaccgaagcgcgcgttaccgatgtgatccgcctggaggcaaagacagatcagaacgccgccggtattaccgaagtgcgccaggcgctggctactgaggaggaagcgcgcgcaacggcggtagatgagctgactgcgcggacggataaaaacgcagcaaatgtcaccgtgctgacgcagaccgtaacggatctggactcgtccactgcgtcgcgctttgaggaaatttcagcagaaatagcgggcattgatggcagtgacatcagagggggaatacaaagcaattccattgcgctgatcaccagtacgctggcgcaggtcagtcagtccacccgaatgagcgtgcagtacggcgcgaacgccgcaggtatccagcgcgttgacaacgtgatggcggatgccagccaggccgttgccgagtcgctcaggacgctggatgccagcgccggcggcggcacggcaaatgccactgattttgcgaagaccctggcggatttttcgcaggtctccgcgacaaaaatcaactccctgtcagtgacggtaaacggtcagcaggcggcaatcgtccagaatgctcaggtctcggccgacatcaacaataacctgaatgcgatgtacagcatcaaggtgggcgttgatgcggctggccgtcagtacgctgcagggatggggatcggtgtgcagaattcgccttatggcatgcagtcgcaggtgctctttctggcggatcggttcgctgtcatgacacaggcaggcggaacggtgagcctgccgttcgtggtgcagaacgggcagacattcatcaacgaagctttcatcaattacgcgtcgatcaccctcgccaaagtgggatcgtggtattccgccaattatgtggccgggcagaccgggaccatcatgaaggcggacgggacgtttgaggtcaacggtgcggtatcgggccagggaaggatgcagataacgaacaaccgcataatctcttttgacgcgcaaaaccggccggcagctgttatggggcaacgcttataa

SEQ ID NO: 626 - DNA, 759 bp, Kosakonia cowanii
  source 1..759: mol_type = genomic DNA
atgagtatttcatctgatgtccagaaactggagccgggcagccgcatccgccttattgaggtcgatggcgacgcgttcggtgccggcattctgcggtttcataacgaaacgatccctcacacagaggccgagatcactgccgccggcggcgatgcgtcaaagctaccgccgaagtctgtctggtggcaggggctggagtacggtgcgtggccctttgaactgaccggcctgtccgtcagcagcgacgggcagagcgcccgcccgacactgaccgtggcaaatatcagcggcacgataggtgcgctctgtcgtcgctttcagggaatggcaaaggcgaaagtgattatccacgagaccttcgctcattaccttgatgcccgcaacttctccggcggcaatcctgccgctaacccgaatgaggagcgcaggcaggtttattacatcgaccgtaaatccagttcggatgatgaaaccgtggagtttgagctgtccagcccggcagacctgcgcggacagctcatccccacgaggcagatccagcccatgtgtacctggtgcatgcgcgggtggtacaaaaccgggaacggctgtacctatgccggtcagaatggctggtttgataaggacggaaacccggtcgacgatccgtcacatgacgtgtgctcaggcctgctgtccaccgggtgcaagccgcggttcggcgccaacaacgagctcgattttggcgggatgccaggcgcgtcacttctgagggggtaa

SEQ ID NO: 627 - DNA, 600 bp, Kosakonia cowanii
  source 1..600: mol_type = genomic DNA
atggagaaacgaaccgttatcaagctgagcgggtcgatggcgcagcgtttcgggcgcacgcaccgccgggcgctgtcctctgccagcgaggttttcagggcgctgtccagcacggttgacggctttgaggattatctccgcgaggcgcgcgccaggggactcgacttcgttatcttccgcgatcgccggaacatcggtcaggaagagttttcgcttctcggtccgggcgatgagctgcgcattatcccggtgatccgcggcagcaagcgtgccggcatcttccaggcggtgctcggggctgccctgattgccgggggtatcgcccttggccctgccggagccgggcttatcggtaaaggggtcgcgctaaatgttgcgctggtcggcgcatcgatggcgctggggggcgtggttcagctgctgtcgccgcaggtggcggggatgaggatgcgtcaggatccggataacaagccctcctatgcgttcggtggcccggtcaacaccactgccagcggcaacccggtaccgcttctctacggccagcgggagatcgggggagccatcatttcagccggcatttacgcggaagatcagcagtaa

SEQ ID NO: 628 - DNA, 480 bp, Kosakonia cowanii
  source 1..480: mol_type = genomic DNA
atgaatgcgcaggctgatgcgctggagactgccccccttaatgagcactgcgctatctctgaagaaaagtcttggggcaaacaatgccagagaaagccggagatcgttaagcaccttggcgttaatggagtagaggcaaaggttaagcacgaagccgtagaagtgatgtgccagcactgcgcgggaaaaggagagatggccacggcctgccgcggctgtaaaggtaaggggaccgtgctggatgagaagagaaccaaactcctcggcgcaccagtcatgaaagtgtgcggtcgctgcaacggcaaccgcttcagccgtttacctatcacactggctcgggcgcgcattgaaaggattattcccgatctgacaagctatcagtggtacagcggctttggcgatgtaatcgcgctactggtgacaaaatgctggcaggaagaggcttttgccgaggtgcaactgcgcaaagtcacaagatag

SEQ ID NO: 629 - DNA, 1083 bp, Kosakonia cowanii
  source 1..1083: mol_type = genomic DNA
atgcagaggccagcccgttacgacgctaacctgccccgtaacctgacctttcgcaagagagataagctttattcctggcgcaacccaataaccggccaggtaatctatctgggccgcattgatcgcagggaagcgatagcccaggccattgaagccaacagctatctttatcagaactacatcccctccagtctacttgagcgcataaaagaaatgcccaccctgacaatggctaaatggctggagaggtatgacgttattctcgagcgaagggaattaaaaccaaacacaatgaaagttcgcaggaaccagattgagaggatcagaaaagagttcggcaccatcgctcttagcgcagttacaacaaaagacattgcggaatttttggaaacatacatagcctgcgataaaaaaagcatggctgcaggtctgagatctgtactactcgatgtattcagagaggcgctcgttgagggccatatagaaaggaacccggcagaacctactcgcaccccagcaccaaaagttaagcgggaacgtctactgcttgaagcgtattttacgatacgagaaacagcagctgctaattcagtatgggcggcaaatgcatttgatcttgcgctggtcacggctcagcgacgcgaggatatagccatgatgaaattcactgacatccgggaagacagattgtttgtcatccaggagaaaacagggaataaactagccatccctttagacctgaaattggaagcagccgatcttcatttaaaagaagtgatagaacgttgcagagtgaacaatccatctgagttcctgctttactcgccggtgcgtcggggtggaagaaagcccggaccactgacgcctgatgggttaacccaggcattttcagatacccgtgatatcactgtgttgaaatttggcccttacccgccgtcctttcacgaaattagaagtctgtccagtaggctttatgagaaggaaaaaggcgaagaatttgcgcagcggctgttgggtcataaaaatttatcaatgaccaaaaaatacctggactcccgtggggctgagtatgttacggtttag

SEQ ID NO: 630 - DNA, 1131 bp, Kosakonia cowanii
  source 1..1131: mol_type = genomic DNA
atggctgccagaccccgtaaaaataatgtaagcgtaccgaatttatatccgctgtatagccggaaggtcaataaagtttactggcgttataaacaccctattacgggtaaatttcatgcactaggtacagatgaagcagaggctatagctattgctactgaggctaatactagactcgcagaacagcgttctcggcaaatcatagcgatcagcgacaaaatcgcgaccagcaaaggtaaggctataaccacaaacacctggctcgaccgttactggaagatccagggtgaaagactggatagtggcgatattaagctcaacacctataagcaaaaggctaagccagtagctttgcttcgtgagcgggtaagtatgaagctgatttcgtcggtagatgtgcgagatatagctgaaatactggaagcctacatttcagatggacaaccgagaatggcgcaggtcatccgctcagttttaatcgatgtatttaaagaagctcaacactatggggaggttccccttgggtataatcctgctcttgcaacaaagcagccgcgccggcgcataacacggcaacgccttaatctggaagaatggcagaaaattttcgatattgccgatgcaaaccataagtatatgggtaatgctatgttgttagcccttgttactggtcagcgtttgggggatatttcaaacatgaaattcagcgatatttgggatgaccatcttcacattgtccaggagaaaactggaagtaagatcgccattcccctcgcgctaagactaaatgcaattaactggagcttacgtgaagtggttgctcgatgccgggattatgcagttagcccatatctggttcattttttccgcgccacttcccaggctgaacgcggggctcaagtgaaatcgaacaccattacaatgaatttcagtaaggcccgtgataaagcagaaataaattggggggatggcacaccagctactttccatgaacaacgatctttagcagagcgtctatatgaagcacagggtattgatacccagaaactgctggggcataaatcgcctaatcagactgcacgttatcatgatgatcgagggaaggagtgggtggttatcttccaaaaatga

SEQ ID NO: 631 - DNA, 252 bp, Kosakonia cowanii
  source 1..252: mol_type = genomic DNA
atgaaaatgattaacgctgcggcggttatgctggtttcgttaatggcatcaggctgtgccagcaacacgcccccgctgtgctataacggggcagtggtgatgaaaagtcgggtggtggtaccggtattcggcataagaaaaccggtcagcaccaccgaatatctctccggcggcagcttcggttaccagtgggttgagcggagtgcttttacggatacatcgtcctgcgacaggctgccgctgacggagtga

SEQ ID NO: 632 - DNA, 252 bp, Kosakonia cowanii
  source 1..252: mol_type = genomic DNA
atgaaaatgattaacgctgctgcggttatgctggtttcgttaatggcatcaggctgcgccagcaacacgcccccgctgtgctataacggggcggtggtgatgaaaagccgggtggcggtaccggtattcggcataagaaaaccggtcagtaccaccgaatatctctccggcggcagcttcggttaccagtgggttgagcggagtgctttcacggataccacgtcctgcgacaggctgccgctgacggagtga

SEQ ID NO: 633 - DNA, 954 bp, Kosakonia cowanii
  source 1..954: mol_type = genomic DNA
atgcagatgtttattgcaggcaccagctttgacgccatcaacgccatggcggccagttatgttctggatgtcattaccatcaccggtaccgggagtaaaacctactcccttgccggggtggaactgacgtatgccatcgtgaatgacttcatgggagggcagttaaccggggcaacctacagcgtcagtgtcagcggattaaccgtgtcgtggaacgtcaataacgccgtcaccctgattgtgtacggcagcccggtggcaggcacgcagagtgactattttggctttcagctcttccagtacctgaacggtgtgaggaccgttaaactggcgcccaattatgtcccgctgtgcctgcgggaaatcatcgatgtgcctgccggcgcgcgtactgtgcagacacaggttccggcgggcaatccggtcatgtgctttcaccggcacaccggagcggcaatggatatctgctggtggaagcccgccacggtcagcgggtatcacgcgctgcagtttcccactgacggcagcaaccagaccgggtgccgggtgtatgtgttttcaaatattctcgcgaatattcctgattacgggttctatctctaccgcgacgggcagatggtctggcacagcaactgccttcctcttcaggttattccgctcacaaacggggatatcaccagcgacacgccgctggcggtgtcgtccagcgtcacggcgcatatcttcgtgccgcaggacccggcttatccgacggggtacagcaactttatgtgtgcatcagcgggtaatgacgggacccggtataaggtgcaggtgggaaaagtattccagagcacctttatcagcagtcccgacgagggcaggcgaatgagagggtgggcatgtggcggggtggggtatatcgaaacgcagttctatgaccagtactacagatatgcccttggcctggcctga

SEQ ID NO: 634 - DNA, 666 bp, Kosakonia cowanii
  source 1..666: mol_type = genomic DNA
atggcaaagccggactggggagacctacagcatcggttcctgtctgagcacgctaaaagcggtgtatcgccaaaagaatggtgtgaagcgcaggggctgaattattcatctgcgcgccggtacattaaaaagcccgcagcgcaaattgcgcaaaaaactgcgcagaaaaaagtgcgcaatgcgcagaaggaaaaagacgttaatgcactggtggaaaaggacggattgacagcgcagcaacgaatctttgtggcggaatacctgaaagaccgcaacgccacccaggccgccatacgtgccgggtacagtgcaaagactgctgagcaaattggttatcagctccttcagaaaacttcagttgccgtagctattgagaaacagcagaaggcatccttgatgcgaacgcttgccagtgctgatgaagtgctggcgcagatgtggcagcttgctacttttgacgctaacgagctctcgcaatatcgccgtggtgcgtgccgctactgtcatggctttggccataactatcagtggcgtgacatggtggagtttgaagagcagcggctaaaagcgatcgagaaaaagggtaaagagcctgtggacgttggcggttaccggggcaacctacagcgtcagtgtcagcggattaaccgtgtcgtggaacgttaa

SEQ ID NO: 635 - DNA, 453 bp, Kosakonia cowanii
  source 1..453: mol_type = genomic DNA
atgaacccgatcaacttcataaagaactattcgcacatcattgttatcggcctgatttgcgtggcgctgtggggactaaatgcccgtaacgcccagttaacagccactaatgaacggctggaaaagctggcgaacagcaaagacgaccagattaacgatctacgctcgaaaaacgacggcctggccgccagcgtgggcgagctggtcaccgccgtcaggcagcagaatcaggtgatgtctcaggtcactgaacagcgcgctgtaaccgcacagcagaaccggaagctacagaatgaaattaagcaataccttgagactgataagtgtgcccagtctcgcgtgcctgataacgctgctgaccggctgcgcgccgcagcaaaagccgctggtggagtaccggacaataagccagccgcaaatcagccttccggcagaactgacctcccgcattga

SEQ ID NO: 636 - DNA, 1077 bp, Kosakonia cowanii
  source 1..1077: mol_type = genomic DNA
atgcagaacacaaacgtagcagtagccgaccagaacgctgttgttaactcaaacatcgcgctgttcgattcacagtaccttaatgccatcagcactttcgcccagattatggcgcagggtgcggcgacagtaccgaaacaccttcagggcaaccaggccgactgtatggccgttgcaatgcaggcggcgcagtggcaaatgaaccctttcgccgtggcgcagaaaacccatctgattaacggcgtgctgggatatgaggcccaactggtaaacgcagtgatttcacgcagcggcgtgctggcgaatcgctttgagtatgagtggtacggcccatgggaaaaagtggtcggaaaatttcacatccgcaaaggtgaaaaaggcgaataccgcgttccggggtggaccatggcggacgaagcaggtatcggcattatcatccgcgcaacgctcaaaggcgaagatcacccccgtgagctggatctgctgctggctcaggcccgcacccgtaattcgacactgtgggctgacgatccccgccagcaaatcgcctatctggcagtaaaacgctgggcgcgtctgttctgtccggatgtgatcctgggcgtttacacacctgatgagcttgaagatcgtcaggaaaaagaaatcaacccagccccgcagcagcgcgtcagcgttgctgatatcccggctgaatcgacaactaacagcgcgcaggagtccggtaccaatattgatggcatggccgacgagttccgcgatcgcattgaagcagctcaatccgtggaccaggccaaagccgtgcgggttgatattgaagcggccaaaactgctctcggttcggcgctattcactgaactgaaaaacaaagccgtacggcgctactacctggtagacgcccgcaacaaggtggaagcggcgatcaactccctgccccagcctgacgaaccggatgctgcagagcagttcaccaaagcagagcaggcactggctgctgcgaagcgccatctgggcgacgaactgtatgaccagtttgccgttaccctgctcgatatgaagcccgaatacgtggcatga

SEQ ID NO: 637 - DNA, 1206 bp, Kosakonia cowanii
  source 1..1206: mol_type = genomic DNA
gtgaaggatgcccgtgtctccctgatgtatttcgaagcgcgccatgtctctaagaccatccagaaggagcggtcgaaggttctcgacatgggcaatctggtgcatgcgcttgcactgcagccggagacgctggccgccgagttcagcattgagccggagatcccggaaggtgcattcaccaccacggcgacgatccgcgagtgcattgacgagtacaacgccagcctgccgcagcagctgagcgctgacgatatcaaagcgctgctggaggcccataacgccaccctgcccgcgccgctgccgctgggcgcagcagtagacgaaaccgcagaaagctatatggcgctgccggaagagttccagcgcatcgagtctgataagaagcagaccgctgcagctatgaaagcctgtatcaaagagtacaacgccaccctgcccgctccggtgaaaaccagcggcagccgtgacgcactcctcgagcagttggcaattattaatcccgacctggtagcgcaggaagcgcagaagccacagccactgaaagtttcgggtacgaaggccgacctgattcagtccgtaaaagcagtaaaaccagatgctgtgtttgccgatgagctgctggatgcctggcgcgagaatccggaaggcaaggtactggtaacccgccagcagtacgccaccgcgctgaacatccagacagcgctgcatgctcacccgaccgccggaaagctgctgcagcatcctgatcgcgccgttgagactagctatttcggcatcgacgaagagaccggcctcgaaatccgcgttcggcccgaccttgaactggacgttgacggtgtgcgcatcggtgccgacctcaagacgatttctatgtggaacatcaagcagtccggcctgcgggcgaagctgcaccgcgaaattattgatcgcgattaccacctgagcgccggtatgtacatggagacggcaagcctcgaccagttcttctggatcttcgtcaacaaggacgagggatatcactggattgccattgttgaggcttcgcaggagttggtggagctgggcatcctggagtaccgcgcaacgatgcgcgccattgccaacgcattcgataccggcgagtggccagcgccgatcaccaccgactacaccgacgaacttaccgagtacgatctgcgccgccttgaagcgctgcgcgcggcttaa

SEQ ID NO: 638 - DNA, 690 bp, Kosakonia cowanii
  source 1..690: mol_type = genomic DNA
atgaaccacgaactgtttcatgcagtacagagccgcgacggcgaaatgctggcgcgcatggcgggcggcagccgcgagcaggccaaggtgatcaacagcgacgccgagcgcatggtggatctcctgttcagtcaactcaagcaggtctttccggcatccacgcagaccaacctgcgcagcgaagcggatgagcgcacggccaaacagcagtggatcgccacgttcgccgaaaatggcatccggagccgcgagcaactggtagccggaatgcagaaagcgcgtgccagcgtgtcaccgttctggccttcgccggggcagtttgtcgcctggtgccgtgaaggcaagggcctcctcggtgtgagtccagcggatgtcatggccgaattctggaagtggcggaagctcgttttcaaataccccaccagcgagcaatacccgtggtcacagccactgctgtatcacgtttgcctggaactgcgccgccggggtgttgatcgccagatgaacgagaaagagctgctcagcgaagccgggcatctgcttgcgcactgggaaaagcgtgttgccgaaggtaagccgatcccacctgttcgccgcatgctggcagcgccgcatcaggaccgggggccgacacccgcagagatgctgatggccgagtataagcgccgccaggcgcaggggagggtttga

SEQ ID NO: 639 - DNA, 681 bp, Kosakonia cowanii
  source 1..681: mol_type = genomic DNA
atgctcgccttttttgagcgcgaagggatgattaccaccgccggagaacgccggaagggaacggtgattaccatcactaattacgtgttttatgctcaaaaaatggacgatttacccgcgcataacaccgcgcataacagcgagcataactgcgcgcataacgaacccagtaacggcgcggcttcagaggttgatgccgcgcataacagcgagcataagggcgcgcttaagcccgcgcatcatgaacaagaagtaatattaaatactaacgtatttaatgatcgtcagaaaatatccaaatctcttcctgatgctgcagttcagaccccggctggtgacaagtggggcacgactgaagatctgcagtgtgctgagtggatgctcgcgctacgcaacctaactaaaccttcactgaagaaaccgaacctgaccacctgggcaaatgacatccgcatgatgcgccagctcgacggccgcacgcatcgcgaaatttgccagctgttcaaatgggctgcgcatgattcgttctggcacaaaaacatcctatcgcccgccaaactgcgtaagcagtgggacacactggtgctgcaccgcgaggatggcagccgtaagaccaccagcgatgcaccggccagtgacgcgcactggaacagccctgaagcctggaaggatttcatatga

SEQ ID NO: 640 - DNA, 597 bp, Kosakonia cowanii
  source 1..597: mol_type = genomic DNA
atggcgcagttacaactcattaagcattcttccaatatcctgatccccgccacgccggagaccagcgatttcctgcaatcaaaatgtaagctcggcaccgtgctggtggccgatttcaaacaagtccgcaacccggcctttcaccgtcgtttcttcgctctgttgaatctcggcttcgaatactgggagcccactggcggggcgatctcctcaaatgaacgcaggctggttaccggctatgccaaatacctggcaatgttcggtgggagcgaaaccgcgctgctggatgctgctgagcagtacctcgatcgtatcgccgataagcgcacgggcagcatcagcgcctgcaaatccttcgacgcctatcgtgcctgggtgactatcgagtccgggcactatgatgccatccagctgcctgacggaaccctccggaaacatccccgcagcatcgccttcgccaatatggacgaaaccgagtttcagcagctctacaaagctgcgctcgatgttctgtggcgctggatcctgtccaaggcattcagagaccagcgcgaggctgagaacgctgccgcgcagctgctgagcttcgggggctga

SEQ ID NO: 641 - DNA, 204 bp, Kosakonia cowanii
  source 1..204: mol_type = genomic DNA
atgactcctgtttacgatctggttcgccgggccgacggcaaaaacgtgttcagtttcccggccggcggacgctatctggtggacacgtcaaatggtcttcagtcgatgcgcccccttttggacgacgaaatcatttttacggtggagagtgccgcgcgctttctgaggaaaattggttatcaggtaatcccgccagcggcgtga

SEQ ID NO: 642 - DNA, 270 bp, Kosakonia cowanii
  source 1..270: mol_type = genomic DNA
atggcaaagcttcttaatttggtggaatgggcagccagcgtatattccacccctccctcactatctaccctccgcagatgggtacgtgaaggcaagatctatcctgcccccgagctacacggtaaagagtataagctccgcccggatgctatctatgttgatccgagcaagaagaatttgcgcttaaaaccgcagcatctaaaaattccgtccaaagggactttactggagagattacagaatgcagaggccagcccgttacgacgctaa

SEQ ID NO: 643 - DNA, 492 bp, Kosakonia cowanii
  source 1..492: mol_type = genomic DNA
atgcgcctgaatgccaaagagttgatcgccgaagcccgtaagatcgcgacagcccctactttgccaccagcagtagcaaagttaatgaccgcgatggcagaccgtctcgatctacagttcgtggtgctgtgcgaatcgcgcaacgaggcgaagcagctggctggtgagaatgctcagatgaagtcggctattaagactcacagcgaatcggtccacttctacgtgggttgtggaaaagatgatccatgcagcaatgacgatgtttgctatgcactcgaagaaactccagttactgatgcatttctcgcctccctgcgcgcggaagcgattactgacgctctggaaaatagctcagactatctcgacaccgactgcgttatggaccggcatgacattagttatcaagacgcagaattgcgcgcagctggtgccatggaaatgcatgattcattggttgcagtagcaaaccatctccggaataaggcaggttaa

SEQ ID NO: 644 - DNA, 1416 bp, Kosakonia cowanii
  source 1..1416: mol_type = genomic DNA
atgatttacacaactggctcaattgctgtcaacggcaacacgctgaccggcaccggcactaatttcaccgcagcaggctctcttatccgtaacggctgcactgtgctggcactgaccagcccggtacaggctttccagatcaccgcaatcgacggcgcgaccagccttacggtgaccccggcggccagcccggacgttcctgccggcacgaagtttgccattctgctgagcgacagcctttctgttgatggtctggcacaggatatcgctgaaacgttcacgatgtaccagcgctatatgggcggctttgctgacgtgatgaatggtgccagcgatgtgaccatcaccatcaacgggcaggcggtcacggtacccggacagatgtcgctggcgaagaaaggcgctaactccgatatcacttcactcagcggtctgacctcggccctgagcgtggagcagggcggcaccggcgcgaagaataaagctgatgcgcgccaggcattatctgctgcatcctctggtgctaactcagacatcaccagtctgtcaggactgaccacggctctcagtatcgcgcagggcggtacaggcgcaaccagtgtttccggcgcgcgcgctgcccttggtatcggtgcggcagcgtctctcggtgatgcgctggcagccggcgcggtgctcaagagagagccgggtaacgtaaacacgacactgaacaacccgacagctatcttcaactggctcaggtctgtcgggttcgggagttatcagttcacggccgctcaggcaggggcaatcatccggtactaccccactttttattttaatgcgggtaacctgcacgctcttctgcagtcgaattactcgacgggtgagctcatctcctggggggctgttgataacggtgggtcatggtcttttgcgcaaaatattctttatggtacagcaaacaccacaagagcaactgacggaacaattcgggcagcttcgccgattgttcgtattgttaaaagcaaagaatactgtacccgaccagatattgatgagcttgattttaagtggtgcggtgccggcgtggctaacgcagaagccgaaggggtgacagtagaaagaccttctaccggtgtttatctgcttaagggttctgacggtctggccaggtctggctggcaaatgtcaccgccacgtgatccgcaaggttctggcgatatggggatcgttgaagcagagcagggggaggatggctcgttaatcattcgactctataaacgccgttacgtgatgactgacgacggtgatatcgaggtagctaaaggggcccctatcgatgttccgcctaccagctggatcgatatacgtctggatatgccagaaaccagtatctggaatcagcgcaatgcagcttcgcagaagcaataa

SEQ ID NO: 645 - DNA, 711 bp, Kosakonia cowanii
  source 1..711: mol_type = genomic DNA
atgcgggacaagacaatcagcgcgattctggcgcatgcggcgcaggcgttcccggctgaatgctgcggtgtggtgatccagaagggacgggttgagaagtatgtcgcctgccggaatctggccacctccccggaggagcagtttgaactgtcgccgaaggattatgcggcagccgaagagcagggcacagtggttgccgtggtgcacagccaccccggcgacggtgccacgacgcagccgagcgagctcgacatgctgatgtgcgacgcgaccgaagtgccgtgggtgatcgcttcatggcctgaaggcgatatccgcaccatcatgccgcgaggcgatcgcccgctgaccgggcgtcagtttgttctcgggcatgctgactgctggtcccttatccgggactactttcgcactgaacacggtatcgcgctgcccgattacagcgtcgatcgtcactggtgggaggagggcgaaaacctctatatggataactggcacgactgcggattcagggagttcgacggtcccccgcggcccggcgatatggtcatcatgcaggtgcaggccagcgtgccaaatcatgccggcgtcctgctggaaggtaacatgctgctgcaccacctgtacgggcagctcagccagcgcatcccgtatggcggctattaccgtgaccggaccattaaagttttacggtacaaggacctgatgtga

SEQ ID NO: 646 - DNA, 339 bp, Kosakonia cowanii
  source 1..339: mol_type = genomic DNA
atggcagttgagaccttctcctggtgcccgaaggtggccgcgcaggcagataccagcttccgcacccgtaaggcgcagttcggggataactatgcgcaggtggccggggacggcatcaacccggtcaccccgcaatggagcgtgagttttaccggcgatgaagcgtatgtccaggccataaaggcgtttctcaagcggcatgccggctggaagtctttcatctggaagccgcccctggagcccgcggggttatggcgatctgaatccatccagatagccacccacggcaacgacaaatacaccctcagtaccacattcattcaggcataccatccatga

SEQ ID NO: 647 - DNA, 2028 bp, Kosakonia cowanii
  source 1..2028: mol_type = genomic DNA
atggggcgcgcgcttggcctgataggtggtgttccggggctcgttatgctcggtgcgggagcctggtatgcaatgtatcagtctcaggagcaggcccggcagtcggcacaggaatatgccagaactattgatcaggtgagccaaaaaacgcgagcaatgaacttgcctgaagcagatgaaaatcgcggtaaaactatagatgcgctagttgaggaaaatcgcttaattggagagcagcaaaaagctatttcagcggtaaaaagacaaatcgatgatctgaataaggcacgcactcagcccgggattacgaaagacaatgatctgaatatagttagagcgctcgccattcttaccgaccaattaaccgttgaagaaaataagcttaatttgatgcgggagaaatcaaccagtattcagcaggtgctggaagggattgatcgccgcagaaatgatttgatacgtgaacaggcctggcgtcagaatgctgcgtatcaatccctgctgatgatgaacggtcagcatcagacatttaaccagcttctcgggcttggcaatcagttactgatggcccggcagggaatgacactggctcccctacgtgttcctcaggcagaagcctcgcagaaacagaccgaggcgctcgaaaaaagccggcgcgaactggccctgtcccgacttaaaggtgaggcaaaagagcgcgcccgccttggctatgctgctgatgagctcggtctgacggctgatccgcaattccagaccaaccggcttgagtacatcaataacgggcttgaagagtggcgcaataacgaggccaacaaaaagcagccaaaagggccaaagacggacgaagaaaaggccgctgacgcttataaaaggatgattaagcagcagaaggagcaaatcgccctgcagggccagagcaccgaacttgccagggtgaaatatcaggtggttgaaggtgaactctccacgctggacaaggcgcagaaggctgaactgatgcgcaacgccgccttaatcgatcaggtcaaattgcgtgagcaactgcgtaattacgaggtgaatctggctgacagcaacgccagcgcccgggcggccaatgatgcgcagctcatcggttacggtcagggcacccggtttcgtgagcggatgcaggagcagttcaatatccgcaaggagtttgagcagaagaataccgaactgctccggcagcggcaggccggggatattgacgaaaccttttaccagcaggggctggcactcaacagacgctatctggaagagcgactgcgcgaccaggaggggtattacaccgcttccgatgcgcagcgcggtgactggttaacgggcatgtctgagggctatgcgaactgggtggacgaggcgaccgactattccgcgatggctgcggacgggatgaagcaggccatgggcggggcggtgaccaccattaccgacatgctcaacggcaatatcgacagctggaaagactggggcatgaacgtgctgaaaattatcgagaccgttctcgttaatatgatggtcgcgaatgccgcgagttctctcggctcactcttcagctttggtgcctcatccgccgcaacggccagtagcgggacggccattcagagcgccgcgtcaaatttcaccttcaacgccaaaggtaatgtctacgactcaccgtctctcagcgcctacagcaacggcatttatcagacgccccagctgtttgccttcgcgaaaggggccggggtatttggcgaggcgggtccggaggcgattatgccactcacacgggcacctaatggtgatctcgctgttcgcgcagtagggatgccgcagttttccggcggcggcccgtcagtgtccttcggcgatatcaacattcagggcggtgcgcagtcgacggcagggcagggagcagccgcatctgccggcaggcaactcaaggatgcaatcgtgacggtgattaatgagcaggccagcatgccgggctcgccattgtggcggcttttgaaaggagcgtga

SEQ ID NO: 648 - DNA, 3804 bp, Kosakonia cowanii
  source 1..3804: mol_type = genomic DNA
atgacgaacacagcgattaaagggcgtaagggcggtggcacaaagacccgcaccccggtggaagccccggacagtattcagtccatagccagagccaaaatcctcgtcgcgctcggcgaaggggagttcgccggcgggctggacgggcgcagcatttatcttggtgatgcgtcatcgtataccccgctgcagaatgccgacggcagttacaacttcaataacgtaaaatatgagttccgctccggcactcaggaccagagctatattcagggctttccgggcgttgagaatgagctgcaggtcgcctacgaactcaaagctgccgtgccgtatgtgcgctctgtctccaatacccagctttccgccctgcgcatccgcctgggctggccctcgctgctgaaccagaaagataacggcgataaagtgggtacgcgcgttgagtatgcgatcgacctgtctgccgacggcggcacatatgtgacggtggtcaacggtgctgtcgatgacaagaccaccaccctttatgagcgcagtcatcgtatcgacctgccaaaagccacaaccggctggcagctgcgcgtgcgccggataacgccggattcaacgacggtgaacattgtggacagcatgcgcgtcgaggcggtcaccgaaatcattgatgcaaagctgcgttatcccaacacggcgctgctctacgtagaatttgacgcgaaacagttcccgaacggcatcccgcaggtggtgtgcaatccgaaggggcgcattatccgcgtgcctgatacctacgatcctgacacgcgcacctattccggcacctgggaaggcgggtttaaatgggcgtggaccgataacccggcgtggatttattacgacatcgtgctcaatgagcgcttcggcctcggtcagaggattgatgcgacccagattgataaatgggagctgtaccgtatcgcgcagtactgcgatcagccggtgccggatggcaaaggtggcagcggtatggagccgcgcttccgctgcaacgtctacattcaggagcgcaatgacgcctggacggtgctgcgcgacctggccggcatattccgcggcatgacctactggggcgacaacaagctgtatgtgctggccgatatgccccgcgatatctggcacatctataaccatgccagtgtggtcgacggtaaatttaccttcgccgatccgagcgaaaccacgcgcaacactgccgcgctggtgaactggtctgatccggcgaatcactacaaagacacgcccgaagtcgtttatgacaacgatctggcgatgcgcttcgattacagccagctcgaaatgacggccattggctgcacccggcagtcagaggctaaccggcgcgggcgctgggcgctgctcacgaacggcatcggtgaggtggtgaccttcagcacgggtatggatgttcccccggtcggtgaggtgatcggcgtggccgcgaatgagctggccggcagggtgataggcggcagggtaagctcggtcagcggtcgtaatatcacgctcgatcgtgccgcagatgtcaaagccggcaaccgactctttctcaacctgccgtcaggtatggcgcaggcccggaccgtgcaggcggttaacgggaatatcgtcaccgtcaccaccgcctacagtgaaacgcctgaggtggagtgctgctggggtgtggatgctgacgatctgtttatcgcgctcttccgcgtaaccggcacccgtgacaacgatgacggcactttcgaggtgaccggcgcgacgtacagcccggatatttacgccgcggtcgataccggcgcgcggctcgatgaaaggccggtcagcgtcattccgcccggcgtgcaggcgccaccagaaaacatcgttatcgacagctactcgacggtcagccagaacattgcgatcaccaccatgcgtgttgcctgggatgctgttaagggtgcaatcgcctacgaagctgagtggcgccgcgacagcggcaactgggtgagcgtgccccgtacttcctccctggggttcgaggtgccgggtatctacgccgggcgttatctggtgcgggtgcgggcgatgaacgccagcgatgtctcgtccatatgggcgacatcagctgaggtcacgctcaccgggaaagtgggtaatccgccgaaaccgtcaggcttcactgcctcggaaacggtcgtgtttggcgtcgagctgaactggggattcccggcaaacacggacgacacgctgaagacggaaattcagtacagcctgaccggtaccgaagatgatgcgatgctgctggccgacgtgccttacccgctgcgcaggtatcagcagatggggctcaaggccgggcaggttttctggtaccgcgcgcagctggtggaccggaccggtaacgaatccggttataccgactgggtacgtggccagtccagctccgatgtgacagacattacagaggccgtactcgcgcagatcaaggatacggatcttttcaaagacctcattgaaaacgccgtggagagcagccaggcagtcgcggaactggccgaggcagtgaagcagaacgccgccggcctggctgcggcggccggggcaacgcggcagacagcagaagccattatcggcaatgctctggccatcgcggatgttgttgtccggcagtcagcccagcagggcgctaactcggcgcggttcgaacaactgcgtgaggttattgccaccgaaacagaatcgcgcgttaccgatgtgatccgcctggaggctaagacggacaagaacgccgccggcatcaccgaagtgcgccaggcgctggcaaacgaaaccgagactcgcgcgacagctgtcgatcagcttaccgcgcagacggaggagaacaaggccagtgtcacggagctgacgcagaccgtgacggatctggactcgtccacagcctcgcgctttgaggagatttcggcagaaatagcgggcattgatagcagtgacatcagagggggaatacagagcaattccattgcgctgatcaccagtacgctggcgcaggtcagtcagtccacccgaatgagcgtgcagtacggcgcgaacgccgcaggtatccagcgcgttgacaacgtgatggcggacgccagccaggctgttgccgagtcactcaggacgctggatgccagcgcgggcggcggcacggcaaatgtcactgattttgccaaaaccatggctgatttttcgcaggcctccgcgacccgcatcaatacgctgtcggtcacggtaaacggtcagcaggcagcgattgtccagaatgctcaggtttctgccgacatcaacaataacctgaatgcgatgtacagcatcaaggtgggcgttgatgccgctggtcgccagtacgctgcagggatggggataggtgtgcagaattcgccggcgggcatgcagtcgcaggtcatttttctggccgaccgtttcgctgtgatgtcgcaggcaggcggaacggtgagcctgccgttcgttatccagaacgggcagacattcatcaacgatggcttcttcagggatgccagcattcagttcggtaaaatcaccgattcactgaagtcggacaactatgccgccggcgcggcgggatggaatctgcctaaaagcggaaatgccgagttcaaccaggtaaccgttcgcggcgcaatttacgccaccaacggtaatttcaacctcacggggccaggaaatacgaccgttattaacgggcttggcgtcacggttaaccttgcaaatggcggtcttataaggctggggagctggtaa

SEQ ID NO: 649 - DNA, 759 bp, Kosakonia cowanii
  source 1..759: mol_type = genomic DNA
atgagtatttcatctgatgtccagaaactggagccgggcagccgcgtccgccttatcgaggtcgacggtgaagctttcggtgccggtattctgcggtttcataacgaaaccatccctcattcagaggccgagatcactgccgccggcggcgatgcgtcaaagcttccgccgaagtctgtctggtggcaggggctggagtatggtgcgtggccctttgaactgaccggcctgtccgtcagcagcgacgggcagagcgcccgcccgacactgaccgtggcaaatatcagcggcacgattggcgcgctctgtcgccgctttcaggggatggctaaggcgaaagtgattatccacgagacctttgctcattaccttgatgcccgcaacttcgccggtggcaatccgggcgctaatccgaatgaggagcgcaaacaggtctattacatcgaccgtaaatccagttcggatgatgaaaccgttgagtttgaactgtccagcccggcagatcttcgtgggcagcttatccccacgcggcagatccagcccatgtgtacctggtgcatgcgcggctggtacaaaaccggaaatggctgcacctacgccgggcagaatggcttcttcgacaaggacggcaatccggtcaacgatccgtcacaggacgtgtgctccggtctgctgtccaccgggtgtaaaccgcggttcggcgctgacaacgaactcgactacggcggctttccgggcgcgtcacttctgagagggtaa

SEQ ID NO: 650 - DNA, 600 bp, Kosakonia cowanii
  source 1..600: mol_type = genomic DNA
atggaaaaacgaaccgttatcaaactgagcggatcgatggcgcagcgtttcgggcgcacgcaccgccgggcgctgtcctctgccagcgaggttttcagggcgttgtccagcacggtggacggctttgaggattatctccgcgaggcgcgcgccaggggactcgacttcgttatcttccgcgatcgccggaacatcggtcaggaggagttttcgcttctcggtccgggcgatgagctgcgcattattccggtgatccgcggcagcaagcgtgccggcatcttccaggcagtgctcggggctgccctgattgccgggggtatcgcccttggccccgccggggcagggcttattggtaaaggggttgcgctgaatgttgcgctggttggcgcatcgatggcgctggggggcgtggttcagctgctgtcgccgcaggtggcagggatgaggatgcgtcaggacccggacaacaagccaagctatgcgttcggcggcccggtcaataccacagccagcggcaacccggtaccgcttctctacggccagcgggagatcgggggcgctattatttcagccggtatttatgcggaagatcagcaataa

SEQ ID NO: 651 - DNA, 759 bp, Kosakonia cowanii
  source 1..759: mol_type = genomic DNA
atgaacctcgaatcattaccgaaattttattccccgaaatcaccgaagcttaacgatcagacgccagcgaccggcggtgtcgcgctgactatcaccgatgtaatggcagcacagggcatggtgcaatcgaaagccagtctcggttttaatctcttcctggcgaaaatggggattcaggatccggcacctgctattgatgggctgatgcaatatgcgctggcgctgaaaaatcctgtgctggggaagctgagcgagaaggcacgcggtgaagttctgccggtgctggtgcagtttgcttatgcagattattcgcgttcggcagccagtaaatcgacctgcccacattgcgaagggaaaggcgtgatgcgggaaatgcaggacgtggttaagcatcctggcgttaatggcgtagaggcaacggttaagcacgaagccgtagaagtgatgtgccagcactgcgagggcaaaggagaggtgggcacggcctgccgcggctgtaaaggtaaggggaccgtgctggatgagaagagaaccaaactccacggcgcaccagtcaggaaagtttgcggtcgttgcaacggaaaccgcttcagccgtttgcctacaacccttgcgcgggcgcgcattgagaagattattcccgatctgacaagttaccagtggtacagcggctatggcgatgtaatcgcgctactggtgacaaaatgctggcaggaagaggcttttgctgaggcgcaacttcgtaaagtcacaagatag

SEQ ID NO: 652 - DNA, 1128 bp, Kosakonia cowanii
  source 1..1128: mol_type = genomic DNA
atggctgccagaccacgtaaaaataatgtcagcgtaccgaatctatatccgctgtatagccggaaggtcaataaggtttactggcgttataagcaccctatcacgggaaaatttcatgcccttggtactgacgaagcagaggctattgcaattgctaccgaggcgaatactcgtctggctgaacaacgctctcgccagatcatggcgatcagcgacaaaatagcgaccagcaaaggtaaggctataaccacaaacacctggctcgaccgttactggaagatccagggtgaaagactggatagtggcgatattaagctcaacacctataagcaaaaggctaagccagtagctttgcttcgtgagcgggtaggtatgaagctgatttcgtcggtagatgtgcgagatatagctgaaatactggaagcctacatttcagatggacaaccgagaatggcgcaggtcatccgctcagttttaatcgatgtatttaaagaagctcaacactatggggaggttccccctgggtacaatcctgctcttgcaacaaagcagccgcgccggcgcataacacggcaacgccttaatctggaagaatggcagaaaattttcgatattgccgatgcaaaccataagtatatgggtaatgctatgttattagcccttgttactggtcagcgtttgggggatatctcaaacatgaaattcagcgatatttgggatgaccatcttcacattgtccaggagaaaactggaagtaagatcgccattcccctcgcgctaagactaaatgcaattaactggagcttacgtgaagtggttgctcgatgccgggattatgcagtgagccagtatctggttcactttttccgcgccacttctcaggctgaacgaggaacacaagtaaaatcgaacaccataacgatgaattttagtaaagcacgtgataaggcggggattgattggggggatggcacgccagcaacattccatgaacaacggtctttagcagagcgtctctacgaagctcagggtgtcgatacccaaaagcttctggggcataaatcgcctaatcagacagccagataccacgatgatcgcggtaaggaatggataaagattgccctgtaa

SEQ ID NO: 653 - DNA, 360 bp, Kosakonia cowanii
  source 1..360: mol_type = genomic DNA
atgaaacgtatgccggacaaagacgctggtttctgggcaggtcttatcgcctggctatacagccacaaaacagaatggggatatgcgggcgttgcgggcatgttttctttgctgcgcagcgcctatgcacagtcttcatggagtaagcgtgtcctcgacgccgtatcttgcagcgccctggcattcttcgccgcgccgacgcttcaggtggtcgggggcgttcttaactggaacgtgcctgatacagccgctcaggtttttgcggtgtacatcgggtatgtcggcaatgactacatcagcgagaaactgcgcgggtggatcagccgcagaacgggagataacagtgaaaatcagtcctga

SEQ ID NO: 654 - DNA, 453 bp, Kosakonia cowanii
  source 1..453: mol_type = genomic DNA
atgaacccgatcaatttcataaagaactattcgcacatcatcgttatcggcctgatttgcgttgcgctgtgggggctgaatgcccgtaacgcccagttaactgccaccaatgagcggctggaaaagctggcgaacagtaaagacgaccagattaacgatctgcgctcgaagaatgacggcctggccgccagcgtgggcgagctggttaccgccgtcaggcagcaaaacgaagtgatgagtcaggtcactgaacagcgcgctgtaaccgcacagcagaaccggaagctacagaatgaaattaagcaatatcttgaagctgataagtgtgcccagtctcgcgtgcctgacaatgctgctgaccggctgcgcgccgcagcaaaagccgctggtggagtaccggacaataagccagccgcaaatcagcctgtcggcggagctgacctcccgcattga

SEQ ID NO: 655 - DNA, 867 bp, Kosakonia cowanii
  source 1..867: mol_type = genomic DNA
atgcgcctgaatgccaaagagctgatcgctgaagccagagtgacagcccctactctgccaccagcagcagcaaagttaatgaccgcaatggcagaccgcctcgatgttcagttcgtggcgctgtgcgaatcgcgtaatgaagtgaagcagctggctgcggaaaatgcggctctgaaggcggaacgtaaacaaattgctgaaattggtgagttaattcaaacccaggataatcggataactgatcaaccatttttcgcagtgatgactaagcgagaaatgatctcttctgaagaccatgactatgaccgcatatgctgggttgaaaaccaaagcggtgattatgttgaagctactgaaacgcagcatcggcgactggaagccatttatcagggtcgttatgaagtcagggaaggctggaataggttcgccatgaaggaaatcgacgtgtttgttactggctgcttcacagagcacggctgtaaagaatatatccgccagaatggacataacctcaacaagccattcatttatgcgttcggtagctaccgcaaccatgaatatcagaaggtgcgtaagttcatcatggggattccacaaacccccgccaccgacgccatcctcgcctccctgcgcgcagaagctcgcaaacaaggtgctgtctttgcagcaaacagaatgctggcagcctgggatgctggtttcgttgaagacacaccagaaaacgcggcagatattgcccgcgcaatcctgatgtctacggaatttatggacgaagcacccgatggcgatttcgatcgttctttcgctgatgaagtgcttgagtccatcgccgcccagcagcgtagcaaatcggaggtgcagtcgtga

SEQ ID NO: 656 - DNA, 1027 bp, Kosakonia cowanii
  source 1..1027: mol_type = genomic DNA
cgttgacggtctggcacaggatattgcggagacgttcaccatgtaccagggctacatgagcggctttgccgatgttatgaaaggtgtcggcgacgtgacaatcaccatcaacggcgaaccggttaccgtaccgggacaaaagtcgctggtgaagaagggggctaactcggacataacttccctaagcggactcactaccgcgctgagtatcgggcagggggggactggcgcaaaggatgctgcaggtgcaagaaaggcgcttcagcttggcggtgcggccacacttgaggttggtactgccgcaggcacagttgcagcgggaaatgatccacgactgaccactctggatggtaagtcaggtggttccatcaccggtcggatctcgatgcctgccggtgccgtagggacttacctcagtgcttcccagaatgcgggcgtcaggcagcgtgtggtaaacgacacatcagcgacgagcgcagtaggcgctctgacgtgggggtataacaacggcagtggttttcagcttgatacgacatggggttcggtgggccttggcgcgtcggcgtggccttacacatttatgatgcagaccgctaatgaaacccagtttggtgcgcgcatctggacgttctctatgtcgagcggagacattatttgcagtggatcaggtaaccaggcgggtacgtttacttttacgaaagcatcgaactctgaccgggagatcaaacacgatatcgtgtataccgacgggcaggaatcgtacgagaacgttaaaaaatactcacccacgtcattcgtctataacgacgatccgcagggcagaaagcgtcgcggggtaattgcacaggatgtgcaggagatcgacccggaatatgtacgcgccatccttaacccttttacgatgaaaaccagcctttctctcgacactaacgtcatgcttcttgatgtggcgctggccctgaaagtggctatctcaaaaatcgaggcactggaagatacggtacaacagctgcgctatggctcctga

SEQ ID NO: 657 - DNA, 442 bp, Kosakonia cowanii
  source 1..442: mol_type = genomic DNA
atgatttacacaactggctccatcgcggtcagcggcaataccctgaccggcaccggcacgaatttcaccgcagcaggttcccttattcgtaacggctgcacggtgctggcactgaccagcccggcgcaggcattccagatcaccgccatcaacagcgcgaccagcctcacggtgacgccggctgccagcccggcggtgcccgccggcacgaagttcgccattctgctgagtgacagcctttcggttgacggtctggcgcaggatatcgctgaaactttcaccatgtaccagggctacatgggcggctttgccgatgttatgaaaggtgtcggcgacgtgacaatcaccatcaacggcgaaccggttaccgtaccgggacaaaaatcgctggtgaagaagggggctaactcggacataacttctctgagcggactcactaccg

SEQ ID NO: 658 - DNA, 383 bp, Kosakonia cowanii
  source 1..383: mol_type = genomic DNA
atgatttacacaactggctccatcgcggtcagcggcaataccctgaccggcaccggcacgaatttcaccgcagcaggctctcttatccgtaacggctgcacggtgctggcactgaccagcccggcgcaggcattccagatcactgccatcaacggggcgaccagcctcacggtgacgccggcggccagcccggcggtgcccgccggcacgaagtacgctattctgctgagcgacagcctttccgttgacggtctggcacaggatattgcggagacgttcaccatgtaccagggctacatgagcggctttgccgatgttatgaaaggtgtcggcgacgtgacaatcaccatcaacggcgaaccggttaccgtaccgggacaaaa

SEQ ID NO: 659 - DNA, 711 bp, Kosakonia cowanii
  source 1..711: mol_type = genomic DNA
atgcgggacaagacaatcagcgcgattctggcgcatgcggcgcaggcgttcccggctgaatgctgcggtgtggtgatccagaagggacggattgagaagtatgtcgcctgccggaatctggccgcctccccggaggagcagtttgaactgtcgccggaggattatgcggcagccgaagagcagggcacggtggttgccgtggtgcacagccaccccggcgacggtgccacgacgcagccgagcgagctcgacatgctgatgtgcgacgccaccgaagtgccgtgggtgattgcatcatggcctgaaggcgatatccgcaccatcatgccgcgcggcgatcgcccgctgaccgggcgtcagtttgttctcgggcacgctgactgctggtcccttatccgggattacttccgcactgaacacggtatcagcctgcccgactacagcgtcgagcgtcactggtgggaggagggtgaaaacctctatatggataactggcactcatgtggattcagggagttcgacggtcccccgcagcccggcgatatggtcatcatgcaggtgcaggccagcgtgccaaatcatgccggcatcctgctggaaggcaacatgctgctgcaccacctgtacgggcagctcagccagcgcatgccgtatggcggctattaccgtgatcgcaccatcaaagttttacggtacaaggatctgatgtaa

SEQ ID NO: 660 - DNA, 732 bp, Kosakonia cowanii
  source 1..732: mol_type = genomic DNA
atgaacaaaaccataatgtcggctatccgggcgcatgcgctggaggaatccccgcgcgagtgctgcggctttgttatccagtctggccgtcgccagcgctatatccccgtatcgaacacccacgaaaacccgaccgagcatttccgtatcgatggcgagttgtgggcgaatgctgaggacatcggtacaattatacgcgttatacattcccaccccggcgacggcgcacggcctataccgtcagacctggatcgccagcagtgcaacaactccggcgtggtctggggtatttacgcgccggacagcgatgaatacgccgagataatgcccgaggcggtcccacttatcggccgcccgtttatcctgggttcacacgactgttgggggcttatcatggactggcacgccacccagggcgttacgttagacgatttccgcgtcgattatccgtggtgggaaagtcagtacctggacaatttctatttcgataactgggagcaagaaggcttcatcgaatgtgacccgtcgcccgggtgcatggtcatcatgcaggttgaatccgataagtggaaccatgcgggcattatcactgaagagggtgaactgctccatcatctgtatggccagccctcctgcattaccccctatgcccgcggctatttcaaggacaggacgatgatctgcgttcgccacaggagcctgccagaggagataaagccatggcgcgtttaa

SEQ ID NO: 661 - DNA, 339 bp, Kosakonia cowanii
  source 1..339: mol_type = genomic DNA
atggcagttgagaccttctcctggtgcccgaaggtggccgcgcaggcagataccagcttccgaacccgtaaggcgcagttcggggataactatgcgcaggtggccggggacggcatcaacccggtcacaccgcaatggagcgtgagttttaccggcgatgaagtctatgttctggccataaaggcgtttctgaagcggcacgccggctggaagtccttcatctggaaaccgcccctggagcccacggggttatggcggtctgaatccctccagatagccacccacggcaatgacaaatacaccctcagcaccacattcattcaggcataccatccatga

SEQ ID NO: 662 - DNA, 351 bp, Kosakonia cowanii
  source 1..351: mol_type = genomic DNA
atggctgttgaaacctataaatggcccgcgcaactcggagcgggcgcaattgaatataaccagacaatccgggcctcacagttcggtgacggttatgagcaggtggctgaaaatggcatcaactctactgccattcaggttccgatgatttatgttggcaaagaggtgttgatcaacgaaattcgctcattcctgctggctcataccgttaaggctttcatcatcacgccacccggcgaggagaaggggttgtatcgggtcgtcaaagattctgtgcgtaagaaccagatcagcagcaacgcagcagagcttactttcaccataaagcgcgcctacggcgtctatgcctga

SEQ ID NO: 663 - DNA, 3135 bp, Kosakonia cowanii
  source 1..3135: mol_type = genomic DNA
atggagatcagccagcgaacgggcaccgcattttctgataatgctgccctttttgcgcgtgccgccgcttcaatgcgtgaattcggctacagctcagatgaagttttgaaggtaactgaggcagtaagcacgggcctcaagctctcaggtgccagtactgcggaagctggttcagtaatcacccagttcagccaggcactggcccagggtgttctgaggggggaagagtttaacgctgtgaacgaggcgggtgatcgagtcattcgcgctctcgctgctggaatgggcgttgccagaaaagacctcaaggggatggcagatcagggaaaattaacgatcgacaaggttgttcccgcattagtgagccagcttggaaccctgcagagcgaatttggctccatgcctgaaaccgtgtcaggctccctgcaaaaagtgacaaactcctttatggcatgggttggcggtatcaatcaggcaacgggtgcaactcaggctttatcgggcggccttaatggtgtcgcaggtacgctggattcattaacgtcgtcagcagtcagcggggcgctgaatgatgttgctgataatatgtccactatcaccaccgtcgctggtggtttgattggtgtgggacttgcgaaatatttaggtggtattgtcacaagtgctacaagcgcaacttcagcgctgatttctgccgcaaaatcagaagttgcccttgctgtagcacaggacaaagcggcccagtctgctgtggcggcctcaagggcggatgtctatcgggcgcagcaaggattacagagagcaaagagcgctgatgttcaggcggcgcagcaggaaaaaatagcggcagctgaagccagagtgactgccgctgagtcacgtttaacaactgctatcgccagcggaacggcggcagagagagtcagagccagagccgcgcttgaaagagctcgttctggacttgctgtaatcagaaataatgatgcgcaggcagttgcggaaagacgtctcgcaagcgctgaggcagcgcgagatcgtaatatagctaaccgcgtaagcacacaaaataacttgaatagcgtcacttccgttggcacaagactgatggggcgcgcgcttgggctgataggtggcgttccgggacttgttatgctcggtgcgggggcctggtatgcaatgtatcagtctcaggagcaggcccgacagtcagcacaggaatatgccagaactatcgatcaggtgagccaaaaaacgcggtcaatgagtctccctgaagcagatgataaccgacgtaagacagtagaagctctggttgagcaaaaccgccttatagatgagcagaaaaaagctatttcagcggtaaaaagacaaatcgatgaacttaataaagcgcgcggccagtcagggataaccaaagacaacgatctgaatatcgttaaatctttaggcattcttactgatcagctaacggtagaagagaacaaactctatttgatgcgcgagaagtctgccagcatccagcaggtgcttgagggaattgagcgccgccggaatgactggatccgtgaacaggcctggcgtcagaatgctgcgtatcagtccctgctgatgatgaacgggcagcatgaaaaatttaaccagcttctcgggcttggcaatcagctactgatggcccggcagggaatgacgctggcacctctgcgagttcctcaggctgaagcctcgcagaaacagaccgatgcgcttgagaaaagccgacgtgatctggctctttcccgcctgaaaggtgaggcaaaagagcgcacgcggcttggctatgctgctgatgaactcggttttgtttctaccgatcctcgctatcaaactaaccggcttgagtacatcaacaacgggcttgaagagtggcgtaataacgaggccaacaaaaagcagcccaaagggccaaagacggacgaagaaaaggccgctgatgcttataaaaggatgatcaagcagcagaaggagcagatcgccctgcagggccagagtaccgaacttgccagggtgaaataccaggtggttgaaggtgaattgtccaccctggacaaggcgcagaaggctgaactgatgcgcaacgctgcattaatcgatcaggtcaaacttcgcgagcagttacgtaattacgaggcaaatctcgccgacagcaacgccagcgcccgggcggccaatgatgcgcagctcattggttacggtcagggcacccggttccgtgagcggatgcaggagcagtttaatatccgcaaggagtttgaacagaagaatactgatctgctccggcagcggcaggccggggatatagatgaaaccttctaccagcaggggctggcactcaatagacgctatctggaagagcgactgcgcgaccaggaagggtattacaccgcttccgatgcgcagcgcggtgactggttaacgggcatgtctgagggctatgcgaactgggtggacgaggcaacggactacgccggtatggctgcagacgggatgaagcaggccatgggcggggcggtgaccaccattaccgacatgctcaacggcaatctcgacagctggaaagactggggcatgaacgtcctgaaaattatcgagaccgttctcgttaatatgatggtggcgaatgccgcgagttcccttggctcactcttcagctttggtgcctcatccgccgcaacggccagcagcgggacagccattcagagtgctgcctcaaacttcaccttcaatgccgccggcaatgtctacgactcaccgtctctcagcgcctacagcaacggcatttatcagactccccagctgtttgcgtttgcgaaaggggccggggtgtttggcgaggccggtccggaggcgattatgccgcttacacgggcaccaaacggtgatcttgctgttcgcgctgtcgggatgccgcagttttccggcggtgggccgtcagtgtcgttcggcgatatcaacattcagggcggtgcgcagtcgacggcaggtcagggggctgcagcatctgccggcaggcagcttaaagatgcaatcgtgacggtgattaatgagcaggccagcatgccgggctcgccattatggcggcttttgaaaggagcgtaa

SEQ ID NO: 664 - DNA, 3717 bp, Kosakonia cowanii
  source 1..3717: mol_type = genomic DNA
atgtctgatattgcaacaatttcgctccgggtgaataccgccgagctggagcgcgggaacaaggcgctggacgatttccagcagacggccggcagcgcggcaaacaaggccgatgatctgaacagcgttttccgggcgggtgccgacagtcagaaaaaaaacactcagagcctgaaagagcaaaaagaagagttgcaggctcttctgaataaaatcagccctgttaaccgggcaatggatgagctggaaacgctgcaaagcaaactggctggctttcgcggtaagggactgctcggtaatgaggattacagccggtttagcgcagtgctggataccacccgcgataaattatttcaggtcatggaagcagagaccgccgaagggcaggagcgactgaagctggctcaggacacgcaacgtgccgccgcagcgcaggactcgttcctgaaatctctgagcgagcaggctgctaccttccgggcctcaaagtcagatgtgcttgagtatcgggcctcaatactgggtttaacgcaagaagccgccccactgattcagcaaatcagggaaagagaactggctatcgccagtgaggctgtgcagacccggattgccgcacaagagcttcgtgataaacaggccgcagagcgccaggcgttagctgaagcatcccgcctgcagtcacaaaatgataacttcgtcgagtcgcttcgtaatcaggctctggctatcggtaaatcacgtgctgaggtgcttgagctgaaagcggctcagatgggactgttgcaggaggccggaccgtacatcgctgcgcttaacgcgcaggaggccgcaaccgcacaggaagcagcaaataaaaaagtttctgccatgcaatctcgcatgctcagggaggcgattgcagagctggaggctgcagagcgcgccgaggcatccgagatgcaacgtgcgcagaatatccgcgactcatttgttcggaccctcgaagagcaggcgacatcgatcggaaaaacacggatcgaattgctggaaatgaaggctgcacaactcggtgtttcccagcaggcagctccttttatcgaaaagctgcgtgagcaggatgaagcatggaagaaggggggcatcagcgccgggcagtaccggcaggcattgagaatgttgccgacgcagttcacggacattgccacgtccattgctggtggcatgccattgtggatggtgctgatccagcagggcgggcaaatcagtgattcttttggaggtctgggcgggctttttcaatttatcaaggaagaggttcttgggtttaaagaggcaacagacgactcttcagaatcactttcagaaaatgcgaactcactggctgagaatgccgaacatggcaggggtatgctttctttcctgactcctgccaggcttgctgttggtgggcttgtgggggtggcttcacttctggcgatagcgtggtacaagggcgcccaggaagctagcgagtttaacaaacaacttatcttaaccggaaactatgctggtaaaacggcggggcaacttagtcaactttccagacaaatagctgatgatgctggtgtaacaataggagaatcatcggcaacactggcgaaaattgttgggtcgggaagatttgatggaaataaacttgaggttgttgctagggcagctgcggccatggaagacgcggttgggcagtcagtagatactacgattgctaatttccagaaactctatgattcaccagtaaaagcatctgttgagctaaacagccaactgcattacttaactgctgcagagtttcagtacattgctgctcttgagcgccgcggtgaaaaggaagaggcagggcaaaaagctgctgatagttatagccgggcagagcagcaacgcagtcagcaggttattgacaaccttggccttatcgatcaggtgattcgtgacgtatctgatacgtggaaagcatattgggatgcagccttaggtattggcagaaaagaatcgacagctgaacagcttgaggttgtgaggcaaagaattaaagaaatcaccaaccaatcccgtcctggggtttttggtatgggtaatgtcggtgatggtggtgctgcaaaaagggagttggcggcattgcttcagcaagagagagagcttgggtttgttattaaatctcaggaaggttacaaccagaaaagggctgagtttaataaaataaatcaagatggtattgatgcgcagatatcgtttaataaatatctggatgctggaaccactcaggcagaaaaaagagctctggcacaaaaggatttgaacaaagctattgccgataacgcgaaagcagttaaagcgacgcagggcttaccgtatgagcagagagtcaagccattgactcctgaacaaatatctaaggcccgagctggcatcgagaagctgtataaagatccaaagatccctaaagccaagggcataacggtggccgcaggcgatcgtgccgaagattctgcgcaggctgaacttctggccctccaggctcagctgaaaacccttcaggatcaccgctctgtcaatgacaccatcagtcagcagcgtaaagacctgtatgccgctgaatctaaatttgccgtcctggaagcggccgcgagcactcggcagttatcgaagcaggagaagtctctgctggcgagcaaaaatcaggtgctgcaacttgcgcagcagaaagctcttcttggtgaccagatcaccgctcaggagcaactgaataagcggatggatacggcgcagaagtacgttactcagatggtggagaagcaagccgggcttgcatctggagccacaatgagtgacagacttgccgggcgacaggcatctctgtcccagttacgcagtggctggctcaatgcaggcggtggtctcaatgatgacggttataagcgggagttaaaggctgctaatgattactacgcagcagaagacaaactacgtggcgactggatggcaggcgccagaaaaggctgggccgagtaccttgatgcggcaaccaacgtttatggctcaatgcaaagcgtagcgcagtcagccctgggcggtatatcagatatgctgacaaacctggtcactaccggaacggccagtttcaaaagtttcgctgcctccatgatgaagatgatcgctgatgtgattaatcgactgctggtggcgtacaccgtgcaggccgcaatgggatggatttctgcaggtacttcaccagcaggtagtggtgcaggccagtcttttgctgtcccgtctttccggccagcgtggaacgggggatatatccctgaattcgacaccggcggttacacaggcgatggcggcaaatatcagccaaaaggggtggtacacggcggtgagttcgtctttaccaaagaggccacagctgcaatcggtgtcaataatctttatgcgatgatgcgtggtgcgcagggatatgctgaaggtggggttgtcggcagaccgcccatgctggggcttatgtccggttctggtaatgctgcaccggtaattaacactactgtaaacgtcgatgccagcggtaacgcttcgtctcaatccagcaactctggggacgctatggggcgcgccatggcggctgaaatacaaaacgctgcaaccctggtagttcagaagcacctgaagccagggggcatgatctacaactttacgaagggacgttag

SEQ ID NO: 665 - DNA, 3762 bp, Kosakonia cowanii
  source 1..3762: mol_type = genomic DNA
atgaccacgacaatcatcaaagggcggaagggtggtggcaccaagacccgtaccccggttgaagccccggacagtattcagtccatagccagagccaaaattcttgtcgcgctcggcgaaggggagttcgccggcggcctggacgggcgcagcatttatcttggcgatgcgtcatcgtataccccgctgcagaatgccgacggcagttacaacttcaacaacgtaaaatatgagttccgctccggcactcaggaccagagctatattcagggctttccgggcgttgagaatgagctgcaggtcgcctacgaactcaaagctgccgtgccgtatgtccgctctgtctccagtacccagctttcagcactgcgcatccgcctgggctggccctcgctgctgaaccagaaagataacggcgataaagtgggtacgcgcgttgagtatgcgatcgacctgtctgtggacggcggcgcatatgacacggtggtcaatggcgctgtcgatgacaagaccaccaccctctatgagcgcagtcaccgtatcgacctgccaaaagccaccaccggctggcagctgcgcgtgcgccggataacgccggattcaacgacggtgaacattgtggacagcatgcgcgtcgaggcggtcaccgaaatcattgatgcaaagctgcgttatcccaacacggcgctgctctacgtagaatttgatgcgaaacagttcccgaacggcattcctcaggtggtgtgcaatccgaaggggcgcattattcgcgtgcctgatacctacgatccggaaacgcgcacctattccggcacctgggaaggcgggtttaaatgggcgtggaccgataacccggcgtggatttattacgacatcgtgctgaatgagcgcttcggcctcggtcagaggattgatgcgacccagattgataaatgggagctgtaccgtatcgcgcagtactgtgatcagctggtgccggatggcaaaggtggcagcggtatggagccgcgctttcgctgcaacgtctacattcaggagcgcaatgacgcctggacggtgctgcgcgacctggccggcatattccgtggcatgacctactggggcgacaacaagctgtatgtgctggccgatatgccccgcgatctctggcacatctataaccatgccagtgtggtcgacggtaaatttaccttcgccgatccgagcgaaaccacgcggaatactgccgcgctggtgaactggtccgatccggcgaatcactacaaagacacgcccgaagttgtttatgacaacgatctggcgatgcgcttcgattacagccagctcgaaatgacggccatcggctgcacccggcagtcagaggcaaaccggcgcgggcgctgggcgctgctcaccaacggcatcggtgaggtggtgaccttcagcacgggtatggatgttccccctgtcggtgaggtggttggcgtggccgcgaacgagctggccggcagggtgattggcggcagggtaagcgcggtcagcggtcgtaatatcacgctcgaccgcgccgcggatgtcagcgccggcaaccggctctttctcaacctgccgtcaggggtggcgcaggcccggaccgtgcaggcggttaacggcaatatcgtcaccgtcaccacggcctacagtgaaacgcctgaagcagagtgctgctggggtgtggatgctgacgatctgtttatcgcgctcttccgcgtaaccggcacccgtgacaacgatgacggcactttcgaggtgacaggcgcgacctacagcccggatatttacgctgcggtggataccggcgcccggctcgatgaaaggccgatcagcgtcattccgcccggcgtgcaggcgccgccggaaaatatcgtcatcgacagctattcgacggtcagccagaacattgccatcacaaccatgcgcgtagcatgggatgccgtaaagggggcaattgcctacgaagccgagtggcggcgcgacagcggcaactgggtgagcgtaccccgcacgtcctccctggggtttgaggtgccgggcatctacgccgggcgttatctggtgcgggtgcgggcggtgaacgccagcgatgtctcgtctatatgggcgacatcagctgaagtcacgctcaccgggaaagtgggtaatccgccgaaaccggtaggcttcaccgcctcggaaaccgttgtgtttggtatcgagctgaactggggcttcccggcaaacacggacgacacgctgaaaacggagatccagtacagcctgaccggaaccgacgacgatgccatgctgctggccgacgtgccttacccgctgcgtaagtatcagcagatggggctcaaggccgggcaggttttctggtaccgcgcgcagctggtggaccggaccggtaacgaatccggttacacagactggatccgcggtcagtccagctccgatgtgacggacattactgaggcggtgctcgcgcagatcaaggacaccgacctgttcaaagacctcatcgagaacgctgtggacagcagtgcgagggttgcggaactggccgaggcagtgaagcagaacgccgacggtctggctgcggcggcaggcgcaaaccgccagacggcagaagccattatcggcaatgcactggctatcgcggatgttgttgtccggcagtcagcccagcagggcgctaactcggcgcggttcgaacaactgcgtgaggtgatcgccaccgaaaccgaagcgcgcgtaaccgatgtgatccgcctggaggcaaagacagagcagaacgccgctggtatcaccgaagtgcgccaggcactgtcaaacgagagcgaggcccgcgcttcagcggtagacgagctgaccgcgaagacggagaaaaacgcggctaatgtcaccgtgctgaaccagaccgtgacggatctggactcctcgaccgcctcgcgctttgaggagatatcggcagaaatagcgggcattgatggcagcgatatcagagggggaatacagagcaattccattgcgctgatcaccaacacgctggcgcaggtgagtcagtccacccgaatgagcgtgcagtacggtgctaacgccgcaggcatccagcgcgttgacactgttatggcagatgcgagccaggcggttgcggagtcgctcagaacgctggatgccagcgcgggcggcggcacggcaacggccactgactttgccaaaacgatggcggatttttcgcaggtctccgcgaccagaatcaactccctttcagtgacggtaaacggtcagcaggcggcaatcgtccagaattcgcaggcagttgcagatatcagcggtaatctttctgcgatgtacagcatcaaggtgggcgtcgatgccgctggccgccagtacgccgcaggcatgggtatcggtgtgcagaacaccccgacgggcatgcagtcgcaggtcattttcctggcggaccgtttcgccgtgatgtcacaggccggcgggacggtgagtctcccgttcctggtgcagaacgggcagaccttcatcaacgaagcctttatcaattatgcgtcgatcaccctcgccaaagtgggatcgtggtattccgccaattatgtggccgggcagaccgggaccatcatgaaggcggacgggacgtttgaggtcaacggcgcggtatcgggtcaggggcggatgcagataacgaataaccgcatcatctcctacgatgcgcaaaaccgtccggcagccgtaatggggcaacgcttataa

SEQ ID NO: 666 - DNA, 3783 bp, Kosakonia cowanii
  source 1..3783: mol_type = genomic DNA
atggaaacgatcactggtgcaaagggtggcagccagaagcagcacacgcctgtagaacagccagatagtgcccagtcgatggcgcgctgccgcatgctgctggcgcttggtgaaggggaattcgccggcggcctggatgcaactcgtatttttctggacgggacgccgctgggcaatgccgacgggacgatgaattttgaaaacgtcacatgggatttccggccgggcacccagacacagaccccgatccctggctttgccgcggtcgagaatgaaaccagtattggcgtatcgctgacgaaagttgccccctggacccgcgcgctgagtaatatccagattgatgcggtgctcgtgcgcattggcattcccggcctgcagcaacagcagaataatggcgatatcgttggtacgactgtcaaatatcacatcgacctggccgtagacggcggcgcgttctcgacggttatgaccaggaccgttaccgagaagctcagctcgctttatgagcttacccaccgcatcaaccttcccaaagccactaccggctggcagattcgcgtggtacgcgatacggacgacagcaccagccagctgctgcagaacaaaacgcaggtgcaggccatcacagaggttatcgacgctcgtcttcgttatccgcacacagcactgttgtatgtgtcgttcaatgcaaaatcattcagcgatataccgaaaatctcctgtaaaccgaaggggcgcatcatccgaatcccctcaaactacgatccgattgcccgtacttacagcggcacctgggatggcacgttcaagtggggatggtcgaacaacccggcatggatctggttcgacgttctgaccgaaccacgtttcggccttggccgccgcatcacggcggatatgctggataagtgggagctataccgtatagcccaacgttgcgatcagaaggtgcccgacggaaagggcggcagcggcaccgagccgcgctttatgtttgacgtttatatacagtctcaggccgacgcatggcaggtgatcaaggatatcgccgccgggttcaacgggatgacgttctggggcaacaacatgttcaacgttgtctctgacatgccggcggatacgtcgaaactgcagatcctcaaccgcgccgcagtgatcggcaagccggtttactcaagcggcagtgaaaagacccgtttttccagtgcgctgattaatttcagcgatccggacaatcactatcaggatcgaactacggctgtgatgttcccggacctggtgaaacagttcaagtttaagcagacgcaaatcacagcgatcggctgtacgcgagagagtgaggctcagcgtcgtggtggctgggcggtgtattccaactctcttgaccgcattatcaccctacaaactgggcttgatggctatgtctatgtgccgggcacggtgtttgcctttgccgatgaacgcctttctggtcgcgtgtacggtggtcgcgttgccgggtacaacggcgggctgaaggctgtgacaactgatcggcgcaccagcgcggttgctggcgacacgctgatgattcgcacgcagggtggaaccgtcgaaagtcgggttatccaggctgtaaatggtacgcagcttgtggtgtccacgcccttcaaggcggaccctttgccgaatgcagtatttgttatagacgctgggcagttgagattacagtactttagagtaactaatctgacgttcaatgatgaggaaaatacctactccattactggggcagaatataactcctctaaatatgacgcggttgataataatgcccgactggatacgccgccgatcagcctgatcccgaccgggcttgttaatcagccgactaatatccaggtatcaagctttgaatccgtaagacaggggcagcgaattactacactgatcgcatcctgggatgcgccactggataaaaatggcaagcctcaggctgatgttatctcataccaggtgcagtggaagcgtggagataatgaatggattaatgtgcaagaaacaggactgcgcaatatagaagtgcccggcatttttgagggtgactatcttgtacgcgtgcgtgccatcaactcaggaggggcttcaagtctgtgggcctcttcactgctgacacacctcaaggggcgcgcgggcgatgttccaaagcccgtagggctgtcagcgtcagaggatgtcgtattcggtatcaatgtcacatggggttttccgaaagatactggcgacacactgagcacggaactgcagtacagcctcgctgcagacggctcaaacccaatgctgctggcggctgtaccttacccgcagaaactctaccagcagatgggtctcaaggcggggcaggagttttggtaccgggccaggcttgttgaccgtaccggcaatcagtcagcctacaccgactgggtacgcggccagtccagctccgatgtgaccgatattacagaggctgtgctcgcgcagattaaggatacggagcttttcaaagacctcatcgagaacgccgtggagggcagcgccaaagttgcggagctggcagtggcagtgaagcagaacgccgacggcctggctgcggcggccggggcaaaccgccagacggcagaagctatcagcggccatgctctggccatcgccgacgtggtgatgcgccagtcagcccaacagggcgctaactcggcgcggttcgaacagttgcgcgaggttattgccaccgaaaccgaggcgcgcgttacggatgtaatccgcctggaggcgaagacggatcagaacgccgcaggcatcaccgaagtacgccaggcgctgtcaaatgagagcgaggcccgcgcttcagcggtagacgagctgaccgcgaagacggagaaaaacgcggctaatgtcaccgtgctgaaccagaccgtgacggatctggactcctcgaccgcttcccgttttgaggagatttcggcagagatcgcgggcattgatggcagtgatatcagagggggaatacagagcaactccattgcactgatcaccaacacactggcgcaggtcaacacccggaccctgctcagcgtgcagtacggcgacaacaaggcagggattcagcgcgttgataacgtgatggcggatgccagccaggccgttgctgagtcgctcaggacactggatgccagcgcgggcggcggcacggcaaatgccactgactttgctaaaacgctggctgatttttcgcaggtctccgcgacaagaattaactccctttcagtgacggtaaacggtcagcaggcggcaatcgtccagaattcgcaggcggttgcagatatcagcggtaatctttctgccatgtacagcatcaaggtgggcgtcgatgccgctggccgccagtacgccgcaggcatgggtatcggtgtgcagaacaccccggcgggcatgcagtcgcaggtcattttcctggcggaccgtttcgccgtgatgtcgcaggccggcgggacggtgagtctcccgttcctggtgcagaacgggcagaccttcatcaacgaagcctttatcaattacgcgtcaatcacgctcgccaaagtgggatcgtggtattccgccaattatgtggccgggcagaccggaaccatcatgaaagcggacgggacatttgaggtcaacggcgcggtatcgggccagggaaggatgcagataaccaacaaccgcatcatttcctacgatgcgcaaaaccgtccggcagccgtaatggggcaacgcttataa

SEQ ID NO: 667 - DNA, 759 bp, Kosakonia cowanii
  source 1..759: mol_type = genomic DNA
atgagcatttcatctgatgtccagaaactggagccgggcagccgtgtccgccttatcgaggttgacggcgaggccttcggtgccggcattctgcggtttcataacgaaaccctccctcacacagaggccgagatcattgctgcgggcggcgatgcgtcgaagctccagccgaaatcggtctggtggcaggggctggagtacggtgcgtggccctttgaactgaccggcctgtccgtcagcagcgacgggcagagcgcacgcccgacactgaccgtggcaaatatcagcggcacgataggcgcgctctgtcgtcgctttcagggaatggcaaaggcaaaagtgattattcacgagaccttcgctcattaccttgatgcccgcaacttctccggcggcaatcctgccgctaacccgaatgaggagcgcaaacaggtctattacatcgaccgtaaatccagttcggatgatgaaactgttgagtttgagctgtccagcccggcagatctgcggggacagctcatccccacgaggcagatccagcctatgtgcacctggtgcatgcgcggctggtacaaaaccggcaacggctgtacctatgccgggcagaatggctggttcgataaggacggcaaccgggtggatgatccttcgaaggacgtgtgctcaggcctgttgtcgaccgggtgtaaaccccggttcggcgccaacaatgaactcgactacggcggctttccgggtgcgtcacttctgagggggtaa

SEQ ID NO: 668 - DNA, 774 bp, Kosakonia cowanii
  source 1..774: mol_type = genomic DNA
atgacagcccttattgatacggcagccatgcttgcacctggcggaaaagtccggctggtagaagtggacgcctcagaattcagtggtggtattcaccgctttcattacagtccttttccgcatactccacgggagattgacgaggcgcagggtgacgaaagcaagctcgggcctaagcctgtagtcttcgatggtgaggtctatgatttctggcctttccagttaacaggcctggctctctcaactgaccaggcggcagagccgtcactcagcgtctcaaaccttgacggccatatctccgcgctatgccttcagtttaaggacatggtgaacgcgaaggtgagcattatcgacacctatacggtgtatctggatgcggtgaattttcccgaccacgttaatcccactgccgatccgactatgttcacgcttcagaccttctggctggataccaaaacgtccgaagatgacgaggtggtgacctgggcgctaagcagcccggcagacctgcaggggctggtaattcccaccagacaaattacttccctctgtgaatgggcgctacgcggacaataccggagcggtgacggttgcacctataacggtacggcttacttcgacgcaaagggaaacctcgtagcggatccggtccttgatgtctgcggcggttgcctgagtgactgtcggaaacgattcggtgccgggcttgcagagccaaacgcggcgatcctcgattttggcggcttcccggcgacggttcttttcacccgataa

SEQ ID NO: 669 - DNA, 600 bp, Kosakonia cowanii
  source 1..600: mol_type = genomic DNA
atggaaaaacgaaccgttatcaagctgagcggatcgatggcgcagcgcttcgggcgcacgcaccgccgggtactgtcctctgccagcgaggttttcagggcgctgtccagcacggtggacggctttgaagattatctccgcgaggcgcgcgccagggggctcgatttcgtcatcttccgtgatcgccgcaatatcagccaggaagagttttcgcttctcggccccggcgatgagctgcgcattatcccggtgatacgcggcagtaagcgtgccggcatcttccaggcggtgctcggggttgccctcattgccgggggtatcgcccttggccctgccggggccgggcttattggtaaaggggtcgcgctgaatgttgcgctggttggtgcatcgatggcgctggggggcgtggttcagttgctgtcgccacaggtggcggggatgaggatgcgtcaggatccggataacaagccttcctatgcattcggcggcccggtcaacaccaccgccagcggcaacccggtgtctctgctttacggccagcgtgaaatcgggggggccatcatttcagccggcatttacgcagaagatcagcagtaa

SEQ ID NO: 670 - DNA, 600 bp, Kosakonia cowanii
  source 1..600: mol_type = genomic DNA
atggcgcgtttaactactattcgcctgtatggcgcgctgggcgcccggttcgggcgagtgcataagctggcggtgcagacatccgccgaagcggtaaaggccctgtgcatcaacttcgacgggctggaagactacctgatgaacgccaaaaagaacggtatgaccttcgccgtgtttcgtggaaagcgcaacataggcgtgcaagatttccaggagctggctggtaaaagtgatattcgtattgcgccggttatggagggggcgaagaaggcgggtatgttccagaccatcctgggagcagtgatggtggtcgccggtattgtcgtcggcgtggcgaccggctggaccggcgtaggtctcacctttggtgccgggcttatcatgtcaggcgcatcaatgatggccggcggcatttaccagatgctctctccacagcctaaagggctacagggacgcgacgacccagacaacaaaccaagctacgccttcggcggttcggttaacactctggcgatgggtaatccggtgccgccactttggggcgagcgggaaattggcggtgcgatcatcagcgccggcatagtcgcggaagacatttga

SEQ ID NO: 671 - DNA, 759 bp, Kosakonia cowanii
  source 1..759: mol_type = genomic DNA
atgaacctcgaatcattaccgaaattttattccccgaaatcgccgaagcttaacgatcagacgccagcgaccggcggtgccgcgctgactatcaccgatgtaatggcagcacagggcatggtgcagtcgaaagccagtctcggttttaatctcttcctggcgaaaatggggattcaggatccggcacctgctattgatgggctgatgcaatatgcgctggcgctgaaaaacccggtgctggggaagctgaatgagaaggcacgcggtgaagttctgccggtgctggtgcagtttgcttacgcagattattcgcgttcggcagccagtaaatcgacctgcccacattgcgaagggaaaggcgtagtgcgggaaatgcaggacgtggttaagcaccatggcgttaatggcgtagaggcaacggttaaacacgaagccgtagaagtgatgtgccagcactgcgcgggaaaaggagaggtgggcacggcctgccgcggctgtaaaggtaagggaaccgtgctggatgagaagagaaccaaactccacggcgcaccagtcaggaaagtttgcggtcgttgcaacggaaaccgcttcagccgtttgcctacaacccttgcgcgggcgcgcattgagaagattattcccgatctgacaagttaccagtggtatagcggttatggcgatgtaatcgcgctactggtaacaaaatgctggcaggaagaggcatttgccgaggtgaagctgcgaaaagtcactagatag

SEQ ID NO: 672 - DNA, 804 bp, Kosakonia cowanii
  source 1..804: mol_type = genomic DNA
atgaaacttgaatcttcactaaaacacttcagtcctcaggggatgaatatcagcgacagcgttaaaggcacctctcctgacaggctgaccggtacagatgtaatggcagcgattggcaccaccagcagccgcgcgcgcttcggtcttgctgcgttcttcgggaaggtcggcatcagtaaaacagatgagcaaatcgcagtacaggcgctggcacggcacgcgatggatgttgcgccgaagaatgtgcgtaaagctgctggtggcgagtttggctggtgcatgcagatgctggcgcagtttgcctttgctgagtatgcccgttcggcagccagcagcagcacctgcaccacctgcagcggtacgggttttttctcccggattgaggatgtgatcaaacatccgggtattttcgatgctgacggtgtcgagctggttgccccgaagattaagcatgagcaggtaaaacatgcatgcacagcctgtggcggtaagggcatcattcctgcgcgctgccgctgcggcgggaagggggaagtactcgatcgagtggcgacgaaagagcggggcgcgccggtattcaaaacctgtgagcgatgctccggcattggcttctcttcagtgccatcaacggctgcacacaaggcaatcattcggcgcctgccggatctgcatgtcagaacatggacccgcaactggaagccatttattgaatcgctggtggagatttgtaagcaggaagaggcaaaagctgaaaaagaattccagtctgcaaccaaatatcacgacgaagacaacataatttag

SEQ ID NO: 673 - DNA, 1146 bp, Kosakonia cowanii
  source 1..1146: mol_type = genomic DNA
atggctgctagaccacgttcacataaaatctcagtacctaacctttactgcaagctggataaacgcacggggaaaatatattggcaatataagcatcccctttccggacgcttccatagccttggaactgatgaggccgaggcaaagcaagttgccacagaagcaaatatgattattgcggaacagcgcacccgccagattctaagcgtgaatgaccgactggccaggatgaaaggcaagagaaccgatatcacggttacagagtggctggacaaatatatggccattcaagaagaacgactcaaacacaatgaattacgtccaaattctttcaagcaaaaaaataaaccagttcgtctgttccgtgaacattgcggtttgcaacacttgaaggatattaccaccctcgatattgccgagatcactgatgcgataaaagcggaaggacataaccgcatggcgcaagtagtgcgtttggtgttgatagacgtcttcaaagaagcgcagcacagcggccatgtgccacccggatataatcctgcgcaggcaactaagcagccgagaaataaagtcaccagacaacgactttccctggatgaatggaagaagatctacgccagcgctgaacaacaagagccttatcttcagtgcgggatgttgctggctttgattacaggccaacgtttgggagatatctgtaacatgcaatttaaagatatttgggatgacatgctgcatgtggaacaggaaaaaacaggctcgaggctggcgatacctttggatttgaaatgtgatgcgatagacctgagtctcagggacgttatttcgaagtgtcgcgacgctgttatcagtaaatatctggtgcatttcaggcatacatctgcccaagcaactagaggagataaggtttctacaagttcactaacaaccacttttagaaaggcgcgagataaaagtggtcttaattgggataaagggactgcccctactttccatgagcaacgttctttatcggaacggttatacagagaacagggtgttgatacgcaaaaactgctggggcataagacacagaaaatgacggacagatacaatgatgacagagggaaagattgggtaatagtgagcgcaaaaacagcgtcgtga

SEQ ID NO: 674 - DNA, 1083 bp, Kosakonia cowanii
  source 1..1083: mol_type = genomic DNA
atgcagaggccagcccgttacgacgctaacctgccccgtaacctgacctttcgcaagagagataagctttattcctggcgcaacccaataaccggccaggtaatctatctgggccgcattgatcgcagggaagcgatagcccaggctattgaagccaacagctatcttgatcagaactacatcccctccagtctacttcagcgcataaaagaaatgcccaccctgactatggctaaatggctggagaggtatgacgttattctcgagcgaagggaattaaaaccaaacacaatgaaagttcgcaggaaccagattgagacgatcagaaaagagttcggcaccatcgctcttagcgcagttacaacaaaagacattgcggaatttttggaaacatacattgcctgcgataaaaaaagcatggctgcaggtctgagatctgtcctactcgatgtattcagagaggcgctcgtggagggccatatagaaaggaacccggcagaacctactcgcaccccggcaccaaaagttaagcgggaacgtctactgctcgaagcgtattttacgattcgagaaacagccgctgctaattcagtatgggcggcaaatgcatttgatcttgcgctggtcacggctcagcgacgcgaggatattgccatgatgaaattcactgatatccgggaagacagactgtttgtcatacaggagaaaacagggaataaattagccatccctttagacctgaaactggaagcggccgatcttcatttaaaagaagtgatagaacgttgcagagcgaacaatccatctgagttcctgctttactcgccggtgcgtcggggtggaagaaagcccggaccactgacgccggatgggttaacccaggcattctcagatacccgtgatgtcactgtgcttaaatttggcccttacccgccgtcatttcacgaaattagaagtctggccagtaggctttatgagaaggaaaaaggcgaagaatttgcgcagcggctattgggccataaaaatttatcaatgaccaaaaaatacttggactcccgtggggctgagtatgttagggtttag

SEQ ID NO: 675 - DNA, 252 bp, Kosakonia cowanii
  source 1..252: mol_type = genomic DNA
atgaaaataattaacgctgcggcggttgtgctgttttcgatactggcgacaggctgcgccagcaatacgccgcctctgtgctataacggggcggtggtaatgaaaagcccggtggcggtaccggtattcggcataagaaaaccggtcagcaccaccgaatatctctccggcggcagcttcggttatcagtgggttgagcggagtgcttttaccagtacatcgtcctgcgacaggctgccgctgacggagtga

SEQ ID NO: 676 - DNA, 252 bp, Kosakonia cowanii
  source 1..252: mol_type = genomic DNA
atgaaaataattaacgctgcggcggttgtgctggtttcgatactggcgacaggctgcgccagcaacacgcccccgctgtgctataacggggcggtggtgatgaaaaaccgggtgtcggtgccggtattcggcataagaaaaccggtcagcaccaccgaatatctttccggcggtagcttcggttatcagtgggttgagcggagtgcttttaccaatacatcgtcctgcgacaggctgccgatgacggagtga

SEQ ID NO: 677 - DNA, 954 bp, Kosakonia cowanii
  source 1..954: mol_type = genomic DNA
atgcagatgtttattgcaggtaccagctttgacgccatcaacgccatggcggccagctatgttctggatgtcatcaccattaccggtaccgggagtaaaacctactcccttaccggagtggagctgacgtatgccatcgtgaatgactttatgggggggcagttaaccggggcaacctacagcgtcagtgtcagcggcttaaccgtgtcgtggaacgtcaataatgccgtcaccctgattgtgtacggcagcccggtggcgggtacgcagagtgattattttggctttcagctcttccagtacctgaatggggtgaggacggtcaaactggcgcccaattatgtcccgttgtgcctgcgggaaatcattgatgtgcctgccggcgcgcgcactgtgcagacgcaggttccggcgggcaatccggttatgtgctttcaccggcataccggggcggcaatggacatcagctggtggaagcccgccacggccaacgggtatcatgccctgcagtttccgacggacggcagcaatcagagcggatgccgggtgtatgtgttttcgaatattctcgcgaacattcctgattacgggttctatctctaccgcgacggacagatggtctggcacagcaactgccttccccttcaggttataccactgacgaacggggatatcaccagcgacacgccgctggcggtatcgtccagcgtcacggcacacatcttcgtgccgcaggacccggcttatccgacggggtacagcaatttcatgtgtgcatcagcgggaaatgacgggacccgttataaggtgcaggtgggaaaagtattccagagcacctttatcagcaatcccgacgagggcaggcgaatgcgggggtgggcatgtggcggggtggggtatatcgaaacgcagttctatgaccagtactacaaatatgcccttggcctggcctga

SEQ ID NO: 678 - DNA, 954 bp, Kosakonia cowanii
  source 1..954: mol_type = genomic DNA
atgcagatgtttattgcaggtaccagctttgacgccatcaacgccatggcggccagctatgttctggatgtgatcaccatcaccggcaccgggagtaaaacctactcccttgcgggagtggaactgacgtatgccatcgtaaatgactttatgggagggcagttaaccggggcaacctacagcgtcagtgtcagcggcttaaccgtgtcgtggaacgtcaataatgccgtcaccctgattgtgtatggcagcccggtggcgggtacgcagagtgactattttggttttcagctcttccagtacctgaacggggtgaggacggtcaaactggcgcccaattatgtcccgttgtgcctgcgggaaatcatcgatgtgcctgccggcgcgcgcactgtgcagacgcaggttccggcgggcaatccggtcatgtgctttcaccggcataccggggcggcaatggacatcagctggtggaagcccgccacggccaacgggtatcatgccctgcagtttcccacggacggcagcaaccagaccggatgccgggtgtatgtgttttcaaatattctcgcgaacatacctgactatgggttctatctctaccgcgacgggcagatggtctggcacagcaactgccttcctcttcaggttaacccgctgactaacggggatatcaccagcgacacgccgctggcggtatcttccagcgtcacggcgcacatcttcgtgccgcaggacccggcttatccgacggggtacagcaatttcatgtgtgcatcagcaggaaatgacgggacccgttataaggtgcaggtgggaaaagttttccagagcacttatatcagcagtcccgacgagggcaggcgaatgcgggggtgggcatgtggcggggtggggtatatcgaaacgcagttctatgaccagtactacagatatgcccttggcctggcctga

SEQ ID NO: 679 - DNA, 360 bp, Kosakonia cowanii
  source 1..360: mol_type = genomic DNA
atgaaacgtatgccggacaaagacgctggtttctgggcaggtcttatcgcctggctatacagccataaaacagaatggggatatgcgggcgtagcgggcatgttttctctgctgcgcagcgcctatgcacagtcctcatggagtaagcgtgttctcgacgctgtatcgtgcagcgcgctggcattcttcgccgcgccgacgcttcaggttgtcggtggtgttcttaactggaatgtgcctgatacagccgctcaggtttttgcggtctacatcggttatgtcggcaatgactacatcagcgagaagctgcgtggctggattaaccgcagaacgggagataacagtgaaaatcagtcctga

SEQ ID NO: 680 - DNA, 1008 bp, Kosakonia cowanii
  source 1..1008: mol_type = genomic DNA
atggcaaagccggactggggagacctacaacgtcggttcctgtctgagcacgccaaaagcggtgtatcgccaaaagaatggtgtgaagcgcagggactgaattattcatctgcgcgccggtacattaaaaagcacgcagcgcaaagtgcgcaaaaatctgcgcagaaaaaagtgcgcaatgcgcagaaggaaaaagacgttaatgcactggttgaaaacgacggattgacagcgcagcagcgaatctttgtggcggaatacttgaaagaccgcaacgccacccaggccgctatacgtgccggatacagtgcaaagactgctgagcaaattggttatcagctccttcagaaaacttcagttgccgttgctattgagaaacagcaaaaggcctccctgatgcgaacgcttgccagtgctgatgaggtgctggcacagatgtggcagctcgctacttttgacgcaaacgagctctcgcaatatcgccgtggtgcgtgccgctactgtcatggcttcggccataactatcaatggcgcgatatggttgagtttgaagagcatcggcttaaagcaatcgagaaaaagggtaaagagcctgtggacgttggcggttacggctatgaccacaaccgggaacctaacccggcatgccctcgctgtaatggtgacggcatcggccagccgtatttcgctgatacccgtaagctgccgcctgtttcccgtctggcgtattccggcatcaagctcggtaaaaacggcgttgagattacagctatcagccgtgagcgcatgtatgaagccgtaatgaagcggcttggcctggcggacagcgagtttgcgcagcagctacagcagatcgaaatcgagcgccgccagctggaggtggaaaaactccgtaaagagcttgctgccgatccggaggacgaagtaccactgcccgtggcaatcaacattaacgtcgcggatgctcgcgtaaggaaagacgatgacggggatatcgccgacccttaa

SEQ ID NO: 681 - DNA, 453 bp, Kosakonia cowanii
  source 1..453: mol_type = genomic DNA
atgaacctgatcaacctcatcaagaactactcacacgtcattgttatcggtctgatttgcgtggcgctgtgggggctgaatacccgtaacgcccagttaacagccactaatgagcggctggaaaagctggcgaacagcaaagacgaccagattaacgatctgcgctcaaagaatgacggtctggccgccagcgtgggcgcgctggtcaccgccgtcaggcagcagaacgaagtgatgagtcaggtcactgaacagcgcgctgtaaccgcacagaagaaccggaagctacagaatgaaattaagcaataccttgaagctgataagtgtgcccagtctcgcgtgcctgacaatgctgctgaccggctgcgcgccgcagcaaaagccgctggtggagtaccggacaataagccagccgcaaatcagcctgccggcagaactgacatcccgcattga

SEQ ID NO: 682 - DNA, 1128 bp, Kosakonia cowanii
  source 1..1128: mol_type = genomic DNA
atggcaaacgaactgattaacatcaaagcaaatcttgataccgaactggtaccggtaaagtcactccttccggcacatgtcagttatgaccgattcactaatgctgcagcggtggcgcttgccacgaaccgggatcttttcaacgcagatcgtcagtctgtcatcaatgcattaaccgcatgcgctaaggatggactgatccctgatggcagggaagctgctctggtaacgtttaaaaagaagcaacctgacggaagtaaaatcccggtagctcagtacatgccgatgatcgatggggtaatgaagcgtgcacgccagtcaggagaaatatcggttatcgccacccgcgtagtgtatgaaaacgacacatttcgcgtctggctggacgatgaaggagagcatgttctttacgagccatgcctcggtgagcgcggaactatgcggggcgcttttgcatacgcgaaaatgaaatccggcgagcttcaatatgaatggctcaacattgacgacatcaataaagtccgtgcggccagccgtaacagcgacagcggtccgtgggtcgactggtatgagtcaatgtccagaaagtccgccgcacatcgcctttgccgccgcctgcctaataattctgaaattatggaaatgctggagcgtggtaccgaaatggtatggcaaaaagaaaaggacattaccccgccgcgagccacgttggatgtgataaccgcagacgtcaactctgacaaacctgaggtggcaaatgcagcacaggagtcgactgccaatatcgacgtgctggccgatgaatttcgggatcgcattgaagcggctcagtacgtcgacaacgccaaagcagtgcgggtggatatcgaagcggccaaaactgctctcggttcggcgctattcactgagctgaaaaacaaagccgtacggcgctactacctggtagacgcccgcaacaaggtggaagcggcgatcaactccctgccccagcctgacgaaccggatgctgcagagcagttcaccaaagcagagcaggcactggctgctgcgaagcgccatctgggcgacgagctgtatgaccagtttgccgttaccctgctcgatatgaagcctgaatacgtggcatga

SEQ ID NO: 683 - DNA, 3399 bp, Kosakonia cowanii
  source 1..3399: mol_type = genomic DNA
atggaatttttctacgtggttaaggccactcagaaatccggtaagcaagatgcagtgatttggttcactgcgaaaagcgaagcacgcgccgccctgacgctcgatgttgagctggaagaggctggtatcgaaactggccgcggtaaagactatgccaaaccgatccacaccgattttccgattgttaacgacctgcctgaagaaggcgtcgtcgacttcacctggtgcgatcgctatcagcttgctgacgaccagcgtacctggaacgtgatccccggtgccgcgccacaggatgaaaccgaccttgccccggccaacaccatctacgatgcagattttcatgccacgcccgtgacggccacggataccgttgatgcggccagcatctcccagcttgaaaaccgcatcccctctgtccgcttcgcagtccatctacttggcgacaaataccattcggagatcagccaagaacaacagatcgtcgccaacgaattggctatggatgaggcaaatgtttatttccagaacctgctgcaggccaaaaatgaagttcctgatatgagcgaactcagccttcacgctgagtggaaactggtgcaggctatcaaagacgttttcccgcagcataaagaacacgaacccgcgctgctggctgctttcatgtcgagctgggtaaaaacagaagtcagcgagcgcgcccagcttattgaagactggctcggcggcagactgccagtccctgaactcatcaccaccagcgatcttggtgatgatgcgcctgtttccaatgcagaagatcagcaagatgctacgcccgaagaggttgcccaggcccacgtacaggcatttcgcgatagggacattactgaactgcacgctgttcctacgctgtcgttccgtcaccgcctcctcgcgcagtttattaccgagaaggaatacgcgtaccacatcgacaatgaacaactgagtactgtgcgccagctggaaatggacaccgataactcctacgtgcaaaacctgctgctggccgccgagaatgtcgaggggatgaaaagtcttcgtgacttcgagttctggaggcttaccgatgctgttaagcgcgtatttccttctgacaaagcgacgcctgatttatccctgatgctccagttcatgaaggcatggaaaacaacggactatatcgatcgcggcctgctcgctaaggaatggattaacggtaaccgggtttcaactattcagcgcaccgacaccggcacgaacgcgggcggcggcatcaaaacagaccgtaatgcagactatgagcatacgttggacacactggatattgagatcgcctgcgcaactctgccgatggattttgatatctacaatatccccggctctattcaccgccgggctaaagatattgttgctgcaaaagaaagtccctggaaggagtggtccgcagcactgcgtaaaactgcaggtatcctggattactcgcgcgctgcaatttttgcgctcattcgtgaagcatcctcaggcataacaccgtttccggaccgcatgactgcctatatcagcgcgacgctcaatgaatataagcatgatacacctgaggccagaatcctcgccgctgcgcgtcagattgacagcgcggccgtggatgcccgagccattgagggcaccgagccgtcacaccaacttgtcaccaccgcacagccagaagtatccaacctcggcggcggcatgttctccatccatggtctgctgggtgaaaaagcaaacccggtcatcaataccccctcaaatgaagtcgaaaaacaggaagtggagaacgtcgatcatgtgcagatggaagagactgacccgagcaaagtcgaagcttgtaatgcgttaccagcagtcgaagtcgctgatgaagctgctgcgcaaacagtttgcgtaagcccggcgggtatcctcgccgctgccacaccggaactgacgagcaacgttgccgccgatctggaccagaatatcgatgctcttagccaggatgagccggaattacctccaaccgaaccagaaacgacagaaatagaaccggtagcggatatttccgagccagaggctgctgctaaggaatggccagcttacttcgagccaggccgttatgaaggtctgccgaacgacgtttaccacgccgctaatggcatcagcagcacacaggtgaaggatgcccgtgtctccctgatgtatttcgaagcgcgccacgtctctaagaccatccagaaggagcggtcgaaggttctcgacatgggcaatctggtgcatgcgcttgcgctgcagccggagacgctggccgccgagttcagcattgagccggagatcccggaaggtgcattcaccaccacggcgacgatccgcgagtgcattgatgagtacaacgccagcctgccgccgcagctgagcgctgacgatatcaaagcgctgctggaggcccataacgccaccctgcccgcgccgctgccgctgggcgcagcagtagacgaaaccgcagaaagctatatggcgctgccggaagagttccagcgcatcgagtctgataagaagcagaccgctgcagctatgaaagcctgtatcaaagagtacaacgccaccctgctcgctccggtgaaaaccagcggcagccgtgacgcactcctcgagcagttggcaattattaatcccgacctggtagcgcaggaagcgcagaaaccgtcaccgctgaaagtatccggtaccaaaacggatctgattcaggcgctcaaagcggttcgcccggatgccgtgttcgccgacgaactgctggacgcctggcgcgagaatccggaaggcaaggtactggtgacccgccagcagtacgccaccgcgctgaacatccaggcagcgctgcatgctcacgcaaccgcagggaaactgctgcagcatcctgatcgcgccgttgagactagctatttcggcatcgacgaagagaccggcctcgaaatccgtgtgcgccctgaccttgagctggacgtagatggcgtgcgtatcggtgccgacctcaaaacgatttctatgtggaacatcaagcagtcaggtctgcggacgaagctgcaccgtgaaatcatcgatcgcgattaccacctgagcgccggtatgtacatggagacggcaagcctcgaccagttcttctggatcttcgtcaacaaggacgaaggatatcactggattgccattgttgaggcctctccggagctggtggagctgggcatcatggagtaccgcgccacgatgcgcgccattgccaatgctttcgatactggcgagtggccagcgccgatcactgacgattacaccgacgaactgactgattacgatctgcgccgcctcgaagcgctgcgcgaccaggcatag

SEQ ID NO: 684 - DNA, 165 bp, Kosakonia cowanii
  source 1..165: mol_type = genomic DNA
atgggcacgcagtggcgcacgggcatgggcggcatcaccggactggattacaacgtgctgccctggctgatgaagctgaatggggtggaggatgaggcaaccgcgttaacggatatccgcgtaatggaaagcgtggcgctgaagattatgcatcagggggcgtaa

SEQ ID NO: 685 - DNA, 678 bp, Kosakonia cowanii
  source 1..678: mol_type = genomic DNA
atgggcttcgcattacctaatggcgccacggtatttgtcggctcgaaactcgccacgcccgtggcggtgacgggcgtcagcaatgccgcaggcgctgtctttaccgttgcaaacggccacggcctcgctgttggcgatgtggtgctggtttccagtggctgggctctgattgatagcctggtggcgcgcgtcacggcgcagaccaccaccagcgtaacgatcggggtgattaacagcaccgataccaacttcttcccggctggctccggcaccggttccttaagcaaagtagccgagtggactgagatcccgcagatcaccgaagtctcacagtccggcggtgaccagcagtatacgcagatccagttccttgccgatgaccgccagcgcaacctggcgacctacaaggcggccaagtcgcagacctttacggttgcgcatgactccacgctgcctatctatgccgtgctgtcagctgctgaccgttctggtgagacgctgccgcttcgcatgtacgtgccaaaggcgaaggaaacgcgttactggtcgggtaagccgtctttcgatccgcagccaaccactgcgccgaatgccgtcgagacggtacagccagcgtttgccatccagtcccgagatatcaccttttacaaagatgctgccccgcaggcagccgcttaa

SEQ ID NO: 686 - DNA, 609 bp, Kosakonia cowanii
  source 1..609: mol_type = genomic DNA
atggcagataaccaggcgtttatagcgtccattaatgcgttcgtcagacaggcaaaggagcgacaggaggaaatggtgcgcgttatcggcatcaaaatcctggcgcggctggtgcagatgtcgcctgtcggcaatccagagctttgggcggtgaaccagacggcggcggcctataacgcggcggttgcagagcataacagtctgctgcggcaaaacccggacaacctgactaaagcaggccggctgcggccaggccgcaaagttaaggacggcatggaccttaaagcgccgccgggctatacgggcgggcgttttcgcggtaactggcaggtgtcgtttgacgcgcgcactaccgacgaaacagggcgggttgataaagctggccatctgacgatgactgccggaaatgtcacgctgggcctgtttaaagtcggtgtgcgcgatatctacttctgcaataacgtcccgtactcttaccgtctggagatggggcattccagccaggcgcccggcggcatggtgcgcatcaccgccgccgagttccagcggtattttagccaggcagtcagcgaggttaaaaatgataccggacatcacaacggcgcttga

SEQ ID NO: 687 - DNA, 483 bp, Kosakonia cowanii
  source 1..483: mol_type = genomic DNA
atgatcattaccgatatcacttcaccggccatgaacagctatgcaggcgaggtggatttgaaagcctttgccgatctgcgcgatatcacgctgccggaaaagatcgcgccattgctcatccgagcgatggattaccttgaggggctggactgggctggctggcgaagcgaaccaaagcagccgctggcgtggccgcgcgcgggcatcgaactggacggatacgaactgcctgacggagaggtaccgcctcaggttgttactgcgcaatgcatgctggcggtcgaggcgatggatggcgatctgctgggcagtgtgcgagaagcagctgtgaagtccgagcgcgtggagggagccgttaccacgacgtatgccgtcgctgacggcgaagtgttcagaccgtcttacccggcggtgatggctttgctcggcgagctggctggtggtcgtggctatgcagtaaacgcttttgcggagcgtgcgtaa

SEQ ID NO: 688 - DNA, 312 bp, Kosakonia cowanii
  source 1..312: mol_type = genomic DNA
atggccactaaatttcagctccagcccaaaccgactttcaaagcagacgtcaccattccgcgcgccggcgaagatgatggcgtgcttacgtttaccttccgtcataaaccggtcaaagaacttgctgcactcgaaaaaattgagggaaaaactgctatcgacttcctcactgaaatcaccgagtcctgggcactaccggatgagttcagtcgtgaaaatctggagatgctcctggataactaccctggcgcgatgaaagcgatcgtcggcacctactatcgggagctgacaggtaaccgtgaaaaaaactga

SEQ ID NO: 689 - DNA, 411 bp, Kosakonia cowanii
  source 1..411: mol_type = genomic DNA
atgataccggacatcacaacggcgcttgagtccatgctgggtctgtgggcagatggcgagggcgtgcgggtgtcatgggataacattcagttcgacccacctggcgacgggctgtatctgatctcccatgatatgcccgcgcagccgtacagcattgatatggccgggggctgccgggtctaccccggcgtgtatcaggtcaccgtcgtcgcgccagcgggtggcggcaaatcacaggccagaatgctggcccgccgtgtcgccgggttgttcccggagaaccaggagatctccggcgacggctttaccgcctgggtgacatcaccgcccgccatttaccccggcatagcggacggcgtgtcctactccatccccgtcagcatcaactaccgggctgatatctcagcttga

SEQ ID NO: 690 - DNA, 351 bp, Kosakonia cowanii
  source 1..351: mol_type = genomic DNA
atgcctgttaactacacccgcattaaagccaccagcacgcgcctgctcactgagaacggcgcggcgtacccggttaagcgcaagggcacagtaactgtcatcggcggcgttgagcatcgcgagccggataagaccttcactgcgatcggcgtgcggactgagtatagacccggcgaaattgacggtacggtcatcataaacggcgacatacgtattgtgtttactgctgataccgagctgcgcaccggtgacatggtggacgtggacggcaaatggtaccgcattgagaagcccaacccggtcaatcctggcaagctgctgttgtgctaccgcgctcagctgagggcatga

SEQ ID NO: 691 - DNA, 771 bp, Kosakonia cowanii
  source 1..771: mol_type = genomic DNA
atgttaatccgaaatatgctcctgaaatactacgcacctgaagatgatggccagggcggcgggggcggcggtaccgaaattacgccagaaattcagaagctgattgatgatcaggtcgcggcccaagtctccggcctgaaaaccaaaaactccgagctgctgggcaccatcaagcagcagaaagacaatttgtctcgctttgacggtatcgacccagatgcggtgcgcggcatcctgcagcgattttctgacgacgaagaggcaaagctgattgccgccgggaaaattgatgaggtgctggataaacgcaccgagcgcctgcgcgctgatgttgataagcagatcaaagcggccaatgaacgcgcggataaagccgaagcgttctccggcaaattccgggatcgcgttctcggcgatgccatccggtcggcagcgtcaaaagctggcgcactggcggaagcatccgatgacctgatcctgcgtgccaaaggcacattccagctcaacgacgaaggcgaggccgtagcagttgatgcaaatggcgacgttctgttcggtaaggacggcaaaaccccactaagcccgcttgaatgggcggagtcgctcaaggagacggccccgcacctgttcccgcgcgctgaaggtaccggcgcgggtggacacaagccaggcggtggtggcagtcagaaacgttcagagatgagcgccagcgataaggcggactatatccgcaagcatggccagcaggccttcctcaaacttccgaaataa

SEQ ID NO: 692 - DNA, 1407 bp, Kosakonia cowanii
  source 1..1407: mol_type = genomic DNA
atggctaataacgacatcacctgggttcgtcctgagcaccgggcggccagtgctgcctggaagaaaatcagggacttttgcaaaggggcagaggcggtaaaagaaccgggcaacaactatctgcctttacttgactccacagacaagagcatgcgcaaccgcaagcgcaacgaagactacctgcagcgggcggtcttctatgcgattactggtaataccaagattggcctcctcgggctggcttttcgaaaggatccgaccttttccgcgccggagaaactgagctatctgctgaagaacgccgacggcgctggcaccagcatttaccagcagtcgcagctggtgaccgagaacgtgctggaggtggcacgtgacgggctttatgtcgattacgctgagggtagtgggcaggccattatcctgcgctatctggccgagaacatcatcaactggcgcacgaagcgcatcaacgggcgcgatcagttggtgctggtggtgttgagggaatgtgtggagcaggaggatggctacgcgttcaaggatgagatccagtatcgcgagcttgcgcttgaagagggccggttcatctgccgggtgtggcgccgcagcgcggatgccggttccgctgtatacgctgttaccagtgaataccagccgaagcccaaaggcaaagacagctgggacgaaatcccgtttaccttcgtcggcgcgcagaacaacgatccgactatcgacgactcaccactcgccgcgctggtggagataaaccatggtcacttccggaacagtgctgattacgaagacagcgtgtggttctgcggccaggtccagccctacatgacggggcttgatgaaggatggcgcgatcatctggaaaagaagggggttaaaattggctcccgctcgccgctgctgctgcccagagagggcaactttggttatgcccaggcgcaacccaacatgctggcgaaagaggcaatggacagtaagcgcgactacatggtgcagctgggtgcccggctcatcgaacagaacgcggcggttaaaaccgcaacgcagtccagcagcgagcagacatcgtccacttctgtactggggatctgcgtctcgaacgtatcggaggcctattcactggccatcggctggtgcgcgaaatatctgggcgtcggcgagcagcaggcggcctacgcgatcaaccaggagttcattgctaaggtcgccgagtccggcatggttaccgccattgtgaacgcctggcagtccggtgcaatccgcgacactgatatgattcgtgcgctgcagaagcttgacctcatcaacccagcagacagccccgacgatatcattgacgaactgcacaaccccacccccaccctgattggcggtaacaatggcaacggtaaatga

SEQ ID NO: 693 - DNA, 1311 bp, Kosakonia cowanii
  source 1..1311: mol_type = genomic DNA
atgacggggatatcgccgacccttaacgtaccgcaggcgcgatttctggcgatgtcgcataaattcaaagcctatgtggcaggcttcggctccggtaaaacatgggtgggctgtggcggcatctgcaaggggatgtgggaacatcccaaaatcaaccagggctacttcgctccgacctatccgcaaatccgggacatcttctatccgacagtggaggaggtggcgttcgactggggccttaaggtccagatcaacgagagcaacaaagaggtccatttctacgccgggaggcagtaccgcggcaccactatctgccgctcaatggagaaaccggccacgattgtcggctttaaaatcggcaacgcgcttgtggatgagctcgacgtgatgcccgccctcaaagcgcagcaggcctggcggaaaatcatcgcccgcatgcgctataaggtcgctggactgcgtaacggtattgacgttaccactacaccagaagggtataagttcgtttatcagcagttcgttaaggcagtgcgcgataagcctgagctggcaaccctgtacggacttgtgcaggcttccacatttgataatgaagcgaacctgcctgatgactatattccctcgctgctggcgagctatccaccagagctgataaaagcctacctgcgcggacatttcactaacctgacaagcggaaccatctaccaccagttcgatcgcaggctgaacaactgcacagatgaagagcagccgggcgagccgctgtttatcggcatggacttcaacgtcggtaagatggcagccatcgttcatgtgaagcgtgaagggttgccgcgcgcggtgcgggagttggtgaaggtctatgacactccggcgatgatcaaacgcattcaggaagagttctggcgctatgagggcggccgctacgttgccagccgccagatctatatatatccggatgcctccggcgacagccgcaaatccaactgcgccagcctgaccgatattgcccagcttagagaagcggggttcagcgtcattgttaacgcttccaacccgccggtgaaagatcgtatcaactcgatgaacgccatgttctgtaatgcgctgggcgaacggcgttacctggttaatgtccagcgctgcccggtctatacggaaagtcttgagcagcaagtatgggataaaaacggcgagccggacaaaaaggcagataacgatcaccccaacgatggtggcgggtatttcattgttaaggattaccccatcgtcaaacctgcatactcaatcactatggataccaccttctga

SEQ ID NO: 694 - DNA, 1026 bp, Kosakonia cowanii
  source 1..1026: mol_type = genomic DNA
gtgaacactgcaaaaattctcaacttccccggtaatgatccggggcaactcaggagcaaccggatggagaaccagagaaccggtttcatcccgttgtaccggagtgtgcttaagcaatcctggtcgaaggacgtcttcctgcgcacgctgtgggaaaacctgctgttgtcagccgcccgtcagccttacacagcaaacttcaagggtcgccaatggccgctgctaaccggacaactggtaaccacctcagccgatttaggcctgagtttatgcgacagggaagggaagccatgcagtcgccacgccgtagacaggatgctggaggttttcgagcgtgaagggatgatatctcgctcaggagagaagagaaaaggctctgtgataactatcacaaattatgctgaatatgctcaaaaaatggacgatttactcgcgcattaccccgagcatatctccgcgcttaatgccgagcatggcgaagccagtaatggtgaggcttccgatggtggtgccgcgcataagaccgagcatttagccgagcgtttccccgagaatcatgaacaacaaagtaataacaacaataaaaacattaaaagatctacgtccgagaattctggcgaatcctctgacaagcccggtaagaaattacctgttctgaaacctgatgctgcaatccagagcggcggtaagtggggaacctctgaagacctccgctgcgctgagtggcttttcagtgaagtacaacgcatcgcaccatcagccagacagcccacctgggcatcatgggctaacgatattcgcctgatgcgagagagagacgggagaacccacaaagaaatatctcaactcttcaggtgggcctgcaacgacagcttctggcagggaaatgttctctgcccggcaacgcttcgtgagaagtggacccagctcgatatcaagcgcaataagcaaccggccggttcggcttctgtcaagccaaaaattgacgtgaataacactgactggatccacggggtgaaactatga

SEQ ID NO: 695 - DNA, 954 bp, Kosakonia cowanii
  source 1..954: mol_type = genomic DNA
atggctacaactgttaataacgatctggtcatttatgacgatctggcgcagaccgctttcctcgagcgccgccaggacaatctggaagtgttcaacacttcctccaacggcgcgatcctgctggacaatgagctcattgaaggcgacttccgcaagcgcgcctttcacaaagtaggtggctccatcgaatcgcgtgatgtgaactccaccggcaaggtgaatggtaaaaaaatcggtgccggtgaggcggtgtctgttaaggcaccgtggaaatacggtccgtacgaaaccactgaggaagcctttaaacgccgtggccgcacggttgacgagttctccgaagtgattggcgttgatgtggctgacgctacgctggaaggctacgtgaaatatggcctgaaggcgctgacggcggcaatcggagcaaacaccgatatggtggtgaccgccgatatcgaaaccgacgggaagaaaaccctgacgcgcggcctgcgcaaatacggtgacaaattcaaccgcgtagtgctgttcgttatgcactccgccacctacttcgacattgtggacgaggcgatcgccagcaagatatacgaagaagcgggcgtggtggtgtacggcggtcagccgggtaccttgggtaagcccgtgctggtgaccgataccatggatgccgccgctattcttgggctggtggccggtgcggtgaccgtgactgaatcccaggcgccgggcttccgctcctacgacatcaacgatcaggaaaaccttgcggtcggctatcgcgcggaaggtacagtcaacgttgagttgctgggctacagctgggacacggccaaaggcgagaacccggatctgaccgccatcggcacggccggtaactggaaaaagcatttcacgagcaacaaatccactgcgggtgtgctgatcaagctgggggccgcatcgggggagtaa

SEQ ID NO: 696 - DNA, 1086 bp, Kosakonia cowanii
  source 1..1086: mol_type = genomic DNA
atggcaacggtaaatgaaatgttacgtgacgaagccatagcccacaccgtctggatcagccgttatagcactggtgtggcaaaccgcatggttaagctgctgaacgacagcgacgctgagcttaccgcacggctgcttttggcgatggatagcctgcccaccagtcagtttacggtcagccgactggaaagcatgttggggagcgtacgcgagcttaaccagcaggcaatagcgggcatgcagaccagcctggaggatgagctcctgcagttggccgggcatgaagcaggctatcaactgagcctgtttgattcactgctgccgcagcgggtgaaagagcggtacccgctgcagagcatcacgcctgagcagctttacgcggccgctatggcccagccctttcagggacgtctgttgagcgaatgggccgataaccttgaagccgaccgcatggcacgcgttgttaatgcaatgcgtcgcggctacctgcagggtgataccacggagaccattgcccggcaggttcgcgggatcgccagcaaaggctataaggacggggcgctgcagctcagccggaccaatgccgccagcattaccaaaacggctgtgaatcacctggcagccacggcgcggactaattttgcagaagccaacggcgatgtcctgaaaggtaaacagtggctctccaccttggacaacaaaaccacgccgacgtgcatcatccgtgatcgcctccgttacactctggacaacaaacctgtcggtcacaaggttccgtatctgcaggggccggggaaaatccatttctgctgccgttccacggagacgctgattaccaaatcatggcgtgaactcggtatcgacagtaacgagctggatgaagatactcgctccagcatggacgggcaggtgccagcggataccacatatcttgactggctggcccggcagtcgctgcggcgacaggatgagatcctcgggccggagcgggccgcgctttaccgcgctggtgagctgaagctcggggaaatgttcacagacaagggggaatggataagcctggcccgccttaaagagctcagttaa

SEQ ID NO: 697 - DNA, 723 bp, Kosakonia cowanii
  source 1..723: mol_type = genomic DNA
atgcgaatgaatgcaaaagagctgatcgccgacgccagagtgacagcccctactctgccaccagcagcagcaaagttaatgaccgctatggcagaccgtctcgatctacagttcgtggtgctgtgcgaatcgcggaacgaggcaaagcaactggctggagagaatgctctgatgaagtcggctattaaaactcacagcgaatcggtccacttctgcgtaggttgtggcaaagatgatccattcagcaatgacgatgtttgctatgcactcgaagaaactcctgccactgatgcattcctcgcctccctgcacgcagaaggggtagagatcctgcgtcaacatccagcaatccaactttgcagccttacccatgtgtgcgatgaagtggccgcccaactccgtagccagtcagcagcatcacctgcaccgttatcagcagcgatcaccgacatcatttccgaacgccagcgccagcagtcagcggaaggctggacgcaggagcatgatgatacgcacgacaaagccgaaatggtccttgcggcgatctcctacctgatggcagttgtgaaccccaatgcttcacagggttggtggccgtgggatattcggtcatggaaaccatccagtggccgccgtgatctggtgaaagctggcgcactaatagcggcagagattgagcgcatcgaccgccaagccgcgcaggtgaagggggtgcaattgtga

SEQ ID NO: 698 - DNA, 1269 bp, Kosakonia cowanii
  source 1..1269: mol_type = genomic DNA
atgatttacacaactggctctatcgcggtgagcggcaataccctgaccggcaccggcacgaatttcaccgcagcaggttcccttatccgtaacggctgcacggtgctggcgctgaccagcccggcgcaggcattccagatcaccgccatcaacagcgcgacaggcctcacggtaacgccgacggccagcccggctgttcccgccggcacgaagttcgccattctgctgagtgacagtctttcggttgacggtctggcgcaggatattgcggagaccttcaccatgtaccagcgctacatgggcggctttgctgacgtgatgaacgggaccggggatgtgacaatcgccatcaacggtgaaccggttaccgttccgggacagaaatcactggtgaagaagggggctaacagcgatatcacttccctgagtggtctcactaccgcgctgagtattgagcaggggggcactggcgcgaaggatgcttcaggtgcaagaaaggcgcttcagcttggcggtgcggccacacttgaggtgggtaatgtgccaggcaccgttgcagcgggaaatgatccacgactgaccactctggatggtaaatcaggaggttccatcactggtcgaatctcgatgccttccggggcagtgggaacgtacctcagtgcagcccagaatgcgggtgtcaggcagcgtgtcgttaatgatgcgagcgcgacgagcgcggtaggggcgctgacgtgggggtataacaacggcagcggttttcagctcgatacaacctggggttcggtgggccttggcgcgtcggcgtggccttacacatttatgatgcagaccgctaatgagactgcttttggcgcgcgcatctggacgttctctatgtccagcggcgacattatctgcagcggctcaggtaaccaggcgggtacatttacttttacgaaagcatcgaactctgaccgggagatcaaacacgatatcgtgtataccgacgggcaggaatcgtacgagaatgttaaaaaatactcacccacgtcattcgtctataacgacgatcagcagggcagaaagcgtcgcggggtaattgcacaggatgtgcaggagatcgacccggaatatgtacgcgccatccttaaccctttcacgatgaaaaccagcctttctctcgacactaacgtcatgctgcttgatgtagcgctggccctgaaagtggctatctcgaaaatcgaggctctggaagaaactgttcaacagctgcgctatggctcctga

SEQ ID NO: 699 - DNA, 711 bp, Kosakonia cowanii
  source 1..711: mol_type = genomic DNA
atgcgggacaagacaatcagcgcgattctggcgcatgcgacgcaggcgttcccggctgaatgctgcggtgtggtgatccagaagggacgggttgagaagtatgtcgcctgccggaatctggccacatccccggaggagcagtttgaactgtcaccggaggattacgcggcagccgaagagctgggcacggtggttgccgtggtgcacagccaccccggcgacggtgccacgacgcagccgagcgagctcgacatgctgatgtgcgacgcgaccgaagtgccgtgggtgatcgcttcatggcctgaaggcgatatccgcaccatcatgccgcgcggcgatcgcccgctgaccgggcgtcagtttgttctcgggcatgctgactgctggtcccttatccgggattacttccgcactgaacacggtatcccgctgcctgactacagcgtcgatcgccactggtgggaggagggcgaaaacctctatatggataactggtacgcttgcggtttcagggaattcgacggtcccccgcggcccggcgatatggtcattatgcaggtgcaggccagcgtgccaaatcatgccggcgtcctgctggaaggtaatatgctgttgcaccacctgtacgggcagctcagccagcgcatcccgtatggcggctattaccgtgaccgcaccatcaaagttttacggtacaaggatctgatgtaa

SEQ ID NO: 700 - DNA, 339 bp, Kosakonia cowanii
  source 1..339: mol_type = genomic DNA
gtggctacagaaacgtttagctggtccccgcgcgttggtgctcagaacgataccagcctccgcacccgtaaggcacagttcggggataattatgcacaggtgtccggggacggtctcaaccctgtcacaccccaatggagcgtgagttttaccggagatgaagagtatgtcctggcgataaaggcctttctgacccggcacgccggctggaagtccttcatctggaaaccgcccctggagtccgcggggttgtggcggtctgaatccctccagatagccacccacggcgcagatctttacaccctcagcaccacattcattcaggcataccatccatga

SEQ ID NO: 701 - DNA, 2136 bp, Kosakonia cowanii
  source 1..2136: mol_type = genomic DNA
atggcctggcaatttgcagctgagaatgcaggtatctcaggtgatcaaattgcggatatctttaaagatatcggtgacaaaatcggtgatgctgtactcaataaatcgggtgacgctgttgatgcgcttaattcgctcggactttcagctgaaaaactttccagagtcactcctgataagcagctactcgcgatcggagaagcacttagcaaaataaatactaatgctgaaaagacaacaatcttagaaagtcttggaaatgacttatcaaggctgttgccacttttcgataataataataaagaacttcttcagtttatccaccttgcaaaagattatggcgtagcgccggatcagaaatctattgatgaccttctcagggtaaacgagatatttcaggatttggaagcgcaggcgagcggcctcaaaatggagatcgccgcaggcctggcgaaggtggatatctcgccgcttcaaaaagggctagatgatctgaaaaaaactttcaccgatccggctgttttacaggggctttcagagctagtgggcggtgttgcatccctcgccggtgggctgggtaaagccgcttcggaattagggaggctgatagaaaactttcagggcgggcagagaattgctgccaatgcttctcgcgttgaaattgagcgcaggataaaaaaccttgaagcggatctcaatgataaggggttccttgctggcgtaaaccgtatcggcatggataccgattccaggcggcaggaactgaaagagctttatgtccgactgaatgaagttaaaaatttccagacaagtcttcctgtcactgccgcaaaagtaagcacttcaacctctgccggatttcagctcggcaaagatgaaacaaacggaaaagtaaaaaccgatagcgccgggaaaaagctggagaacgctttcaaatccgccgagacggcttacctgcgccagatagcgcttatcgataccactggtaaaaaaagcgcagaagttaccgagctgcaaaagcttcagttcgatgttgtcgacgggaaacttctggggctgaacgacacgcagcggcagcgcctcgagcaactggcaacggaagttgatcggcttaatgccgtaaaaaaggccaacgaagaaaatctcaaagttgcagagtatgtcgcaaacctgcagcgtgaaaacgccaacaacgccgcttcactaaatgccgacatcgttggtgctggtcttggtgacaaggcgcgagagcgtatgcgccagcggcttgacgtggagcgcgagtttaatgaaaaacgggccgatctggagcagcgctatcagcgcggggatattaaaagccaggaagaattcgatcgctataccagtgagcttgagaaggcccagtcccagcgactgaacgattacgccgattactaccagcagatcgacagcctcgatgccgactggatatctggtgcgcgggacgggctggcaaactgggtggatgatgcatcaaattactccctgcaggcggccagtgccatgcagtctgcgttatccggcatcaacagtaatctggtaaatatgcttaacggcagcaaagcaagctggaaagactggggcgtcagcgtgctgaaaattatccagaatgtgctcgttaatatggccatggcgaaaggtatcagttcccttggctcattgttcagcttcggtgcagcgtctgcggccaccgccagcagcggaacagccattcaggaagctgcgtcgaacttcaccttcaatgccaaaggcggggtttatgaatcttccgacctgagtaaattcagcaacagcattgtgaatagtccaaccatgttcgccttcgccaaaggtgccgggctgatgggcgaggccgggccggaggcaattatgccgctcacacgcgcagccgatggatctctgggtgtccgggctctggacaccgcgcaggggcagggcgccggcgtgtcagtcagcatcggcgatattaatttcagctcaccagcgcagcagcccgccagccagggcattgccagcgctgctggccgccagctgacggatgctattttgcgaacggttaatgaagaagtcagccgccccggcacccctctctggcgcgcaattaaaggaggataa

SEQ ID NO: 702 - DNA, 3762 bp, Kosakonia cowanii
  source 1..3762: mol_type = genomic DNA
atgacgaacacagcgattaaagggcgtaagggcggtggcacaaagacccgcaccccggtggaagccccggacagtattcagtccatagccagagcgaaaatcctcgtcgcgctcggcgaaggtgaattcgccggcgggctggacgggcgcagcatttatcttggtgatgcgtcatcgtataccccgctgcagaatgccgacggcagttttaacttcaacaacgtcaaatatgaattccgttccggcactcaggaccagagttatattcagggctttccgggcgttgagaatgagctgcaggtcgcttacgaactcaaagctgccgtgccgtatgtgcgctctgtctccaatacccagctttcagcactgcgcatccgcctcggctggccctcgctgctgaaccagaaagataatggcgataaagtgggtacgcgcgttgagtatgcgatcgacctgtctgtcgacggcggcgcatatgtgacggtggtcgacggcgctgtcgatgacaagaccaccaccctctatgagcgcagtcaccgtatcgacctgccaaaagctaccaccggctggcagattcgcgtgcgccggataacgcctgattcaacgacggtcaatgttgtggacagtatgcgcgtcgaggcggtcaccgagatcatcgatgcgaagctgcgttaccccaacacggcgttgctctacattgaatttgatgcgaagcagttcccgaacggtattccacaggtggtgtgcaatccgaaggggcgcattattcgcgtacctgatacctacgatcccgacacgcgcacctattccggcacctgggaaggcgggtttaaatgggcgtggaccgataaccctgcgtggatttattacgacatcgtgctgaatgagctgttcgggcttggtaagaggattgatgcgacccagattgataaatgggagctgtaccgtatcgcgcagtactgcgatcaactggtgccggatggcaaaggtggcagcggtatggagccgcgctttcgctgcaacgtctacattcaggagcgcaatgacgcctggacggtgctgcgtgacctggccggcatattccgtggcatgacctactggggcgacaacaagctgtatgtactggccgatatgccccgcgatatctggcacatctataaccatgccagtgtggtcaacggtaagtttacctttgccgatcccagcgaaactacgcgcaacaccgcggcgctggtgaactggtccgatccggcgaatcactacaaagacacgcccgaagtcgtttatgacaacgagctggcgatgcgcttcgattacagccagctcgaaatgacggccatcggctgcacccggcagtcagaggcaaaccggcgcgggcgctgggcgctgctcaccaacggcatcggtgaggtggtgaccttcagcacgggtatggatgttccccctgtcggtgaggtgatcggcgtggccgcgaacgagctggccggcagggtgattggcggcagggtaagcgcggtcagcggtcgtaatatcacgctcgaccgtgccgcagatgtcaaagccggcaaccggctctttctcaacctgccgtcaggggtggcgcaggcccggaccgtgcaggcggttaacgggaatatcgtcaccgtcaccacggcctacagtgaagcgcctgaagcggagtgctgctggggtgtggatgctgacgatctgtttatcgcactctttcgcgttaccggcacccgtgacaacgatgacggcactttcgaggtgaccggcgcgacgtacagcccggatatttacgccgcggtcgataccggcgcccggctcgatgaaaggccggtcagtgtcattccgcccggcgtgcaggcaccgccagaaaacatcgtcatcgacagctattcgacggtcagccagaacattgccatcaccaccatgcgtgtggcctgggattctgttaaaggggcaatcgcctacgaagccgagtggcgccgcgatagcggcaactgggtgagtgtaccccgcacgtcctccctggggtttgaggtgccgggtatctacgccgggcgttatctggtgcgggtgcgggcagtaaacgccagcgatgtctcgtccatatgggcgacatcagctgaggtcacgctcaccgggaaagtgggtaatccgccgaaaccggtaggcttcaccgcctcggaaactgttgtgtttggtatcgagctgaactggggattcccggcgggcacggacgacacgctgaaaacggagatccagtacagcctgaccggaaccgacgacgatgccatgctgctggccgacgtgccttacccgctgcgtaagtatcagcagatggggctcaaggccgggcaggttttctggtaccgcgcgcagctggtggaccggaccggcaacgaatccggttacacagactggatccgcggtcagtccagctccgatgtgaccgatattacagaggccgtgctcgcgcagatcaaggataccgacctgtttaaagacctcatcgagaacgccgtggagggcagccaggcggtcgcggatctggctgaggcagtcaaacagaacgccgacggcctggctgcggcggcaggcgcaaaccgccagacggcagaagccattatcggtaatgctctggccatcgccgacgtggtggtgcgccagtcagcccagcagggcgctaactcggcacggttcgaacagctgcgcgaggtgatcgccaccgagaccgaggcgcgcgttacagatgtgatccgcctggaggcgaagacggaccagaacgccgccggtattaccgaggtgcggcaggcgctggcaaacgaaaccgaggcacgggcgacagctgtcgatcagcttaccgcgcagacggaagagaacaaggccagtgtcacacagctgacgcagaccgtgacggatctggattcctcgaccgcctcgcgctttgaggaaatttcggcagagatcgcgggcattgatggcaatgaaatcagagggggaatacagagcaactccattgcgctgatcaccactacgctggcgcaggtcagtcagtccacccgaatgagcgtgcagtacggcgctaacgccgccagtattcagcgcgttgatactgtgatggcggacgccagccaggccgttgccgagtcgctcaggacgctggatgccagcgcgggcggcggcacggcaaatgccactgactttgccaaaacgatggcaaacttctcacaggtttccgccacgaaaattaactctctttcagtgacggtaaacggtcagcaggcggcaatcgtccagaattcgcaggcggttgcagatatcagcggtaacctttctgcgatgtacagcatcaaggtgggcgtcgatgccgctggccgccagtacgccgcaggcatgggtatcggtgtgcagaacaccccggcgggcatgcagtcgcaggtcattttcctggcggaccgtttcgccgtgatgtcacaggccggcgggacggtgagtctgcctttcctggtgcagaacgggcagaccttcataaacgaagcctttatcaattatgcgtcgatcaccctcgccaaagtgggatcgtggtattccgccaattatgtggccgggcagaccgggaccatcatgaaggcggacgggacgtttgaggtcaacggcgcggtatcgggccagggaaggatgcagataacgaacaaccgcatcatctcttttgacgcacaaaaccggccggcagctgttatggggcaacgcttataa

SEQ ID NO: 703 - DNA, 759 bp, Kosakonia cowanii
  source 1..759: mol_type = genomic DNA
atgagcatttcttctgatgtccagaaactggagccaggcagccgcgtccgccttatcgaggttgacggcgaagcgttcggcgccggcattctgcggtttcataatgaaaccctccctcacacagaggccgagatcattgccgctggcggcgatgcgtcaaagcttccgccgaagtctgtctggtggcaggggctggagtacggtgcgtggccctttgaactgaccggcctgtccgtcagcagcgacgggcagagcgcccgcccgacactgaccgtggcaaatatcagcggcacgattggcgcgctctgtcgccgctttcaggggatggctaaggcgaaagtgattatccacgagaccttcgctcattaccttgatgcccgcaacttctccggcggcaatcctgccgctaacccgaatgaggagcgcaggcaggtctattacatcgaccgtaaatccagttcggatgatgaaaccgtggagtttgagctttccagcccggcagacctgcgcggacagctcatccccacgaggcagatccagcccatgtgtacctggtgcatgcgcggctggtacaaaaccgggaacggctgtacctattccggtcagaatggctggtttgataaggacggaaacccggtcgacgatccttcgaaagatgtgtgctcaggcctgctttccaccgggtgcaagccgcggttcggcgccaacaacgaactcgactacggcggctttccgggcgcgtcacttctgagggggtaa

SEQ ID NO: 704 - DNA, 600 bp, Kosakonia cowanii
  source 1..600: mol_type = genomic DNA
atggagaaacgaaccgttatcaagctgagcgggtcgatggcgcagcgtttcgggcgcacgcaccgccgggcactgtcctctgccagcgaggttttcagggcgctgtccagcacggtggacggctttgaggattatctccgcgaggcgcgcgccagaggactcgacttcgttatcttccgcgatcgccggaacatcggtcaggaagagttttcgcttctcggcccgggcgatgagctacgcattatcccggtgatccgcggcagcaagcgtgccggcatcttccaggcggtgctcggcgttgccctgattgccggagggatcgccctcggccctgccggagcgggactcatcgggaaaggcgctgcgctgaatatcgcccttgttggtgcgtccatgtcgctgggtggtgtggtgcagctgctgtcgccgcaggtggctggattgaggatgcgtcaggacccggataacaagccctcctatgcgttcggtggcccggtcaacaccacagccagcggcaacccggtaccgcttctctacggccagcgggagatcgggggcgctattatttcagccggtatttatgcggaagatcagcaataa

SEQ ID NO: 705 - DNA, 759 bp, Kosakonia cowanii
  source 1..759: mol_type = genomic DNA
atgaacctcgaatcattaccaaaattttattccccgaaatcaccgaagcttaacgatcagacgccagcgaccggcggtgtcgcgctgactatcaccgatgtaatggcagcccagggcatggtgcagtcgaaagcaagtctcggttttaatctcttcctggcgaaaatggggattcaggatccggcacctgctattaatgggctgatgcaatatgcgctggcgctgaaaaatcctgtgctggggaagctgagcgagaaggcacgcggtgaagttctgccggtgctggtgcagtttgcttatgcagattattcgcgttcggcagccagtaaatcgacctgcccacattgcgaagggaaaggcgtggtgcgggaaatgcaggacgtggttaagcaccctggcgttaatggcgtagaggcaacggttaagcacgaagccgtagaagtgatgtgccagcactgcgcgggcaaaggagaggtgggcacggcctgccgcggctgtaaaggtaaggggaccgtgctggatgagaagagaaccaaactccacggcgcaccagtcaggaaagtttgcggtcgttgcaacggaaaccgcttcagccgtttgcctacaacccttgcgcgggcgcgcattgagaagattattcccgatctgacaagttaccagtggtatagcggttatggcgatgtaatcgcgctactggtaacaaaatgctggcaggaagaggcttttgccgaggtgcaactgcgcaaagtcacaagatag

SEQ ID NO: 706 - DNA, 252 bp, Kosakonia cowanii
  source 1..252: mol_type = genomic DNA
atgaaaataattaacgctgcggcggttgtgctgttttcgatactggcgacaggctgcgccagcaacacgccgccgctgtgctataacggggcggtggtgatgaaaaaccgggtgccggtgccggtattcggcataagaaaaccggtcagcaccgccgaatatctctccggcggcagcttcggttatcagtgggttgagcggagtgcttttacggatacctcgtcctgcgacagactgccgctgacggagtga

SEQ ID NO: 707 - DNA, 954 bp, Kosakonia cowanii
  source 1..954: mol_type = genomic DNA
atgcagatgtttattgcaggtaccagctttgacgccatcaacgctatggcggcaagctacgttctggatgtcatcaccatcaccggcaccgggagtaaaacctactcccttgccggagtggaactgacgtatgcaatcgtgaatgactttatgggagggcagttaaccggagcaacctacagcgtcagtgtcagcggcttaaccgtgtcgtggaacgtcaataatgccgtcaccctgattgtgtacggcagcccggtggcgggtacgcagagtgactattttggctttcagctcttccagtacctgaacggggtgaggacggtcaaactggcgcccaattatgtcccgttgtgcctgcgggaaatcattgatgtgcctgccggcgcgcgcactgtgcagacgcaggttcctgcgggcaatcctgtcatgtgctttcaccggcacaccggggcggagatggatatctgctggtggaagcccgccacggtcaacgggtatcacgcgctgcagtttcccacggacggcagcaatcagaccgggtgccgggtgtatgtgttttcgaatattctcgcgaacattcctgattacgggttctatctctaccgcgacgggcagatggtctggcacagcaactgccttcctcttcaggttaacccgctgacgaacggggatatcaccagcgacacgccgctggcggtatcgtccagcgtcacggcacacatcttcgtgccacaggacccggcttatccgacggggtacagcaatttcatgtgtgcatcagcgggaaatgacgggacccggtataaggtgcaggtgggaaaagttttccagagcacctttatcagcagtcccgacgagggcaggcgaatgcgggggtgggcatgtggcggggtggggtatatcgaaacgcagttctatgaccagtattacagatatgcccttggcctggcctga

SEQ ID NO: 708 - DNA, 615 bp, Kosakonia cowanii
  source 1..615: mol_type = genomic DNA
atgactaaacagataaacgatacccccacgcgggggccttccgaccatagtgtccgtgatcaggttgttgacgcagccactgagcatttcggccactacggctacgaaaaaaccacggtctccgatctcgccaaagcgatcggtttctcaaaggcttatatctataagttttttgattctaaacaggcaatcggcgaagttatctgctcaaaccggctggcgatgatcatggaaattgttaatgctgcgattgcggatgcgccgacagctgctgagaaaattcggcgattattcagagcattatcagaatccggcagcgatttgttttttcgtgaccgtaagttgtacgacatcgcggccgttgcggcacgtgataactggccttcagcgcaagcgcatgagcaacgtctgcgtcagcttattgaacagatcattgttgaagggcgtgaggctggtgagtttgaaagaaaaactccccttgacgagactgctgatgcgatttttatggtcatgcgaccttatatcagcccggtgcagctgcaatataatctggaaactgccccggccgcagccgtattactgccctccctgatcctgagaagtttgtccccatga

SEQ ID NO: 709 - DNA, 414 bp, Kosakonia cowanii
  source 1..414: mol_type = genomic DNA
atgtccagagtctttaaatcacacagcaccgacccctacgaggtggaggtggagatgaaacgcatgccggacaaagacgcgggtttctgggcaagtcttatcgcctggttatacagccacaaaacagaatggggatacgcaggtgtggcgggcatgttttctttattgcgcagcgcctatgcacagtcctcatggagtaagcgtgtcctcgacgccgtatcgtgcagcgcgctggcattcttcgccgcgccgacgcttcaggtagtcgggggtgttcttaactggaacgtgcctgatacagccgctcaggtttttgcggtgtacatcggttatgtcggcaatgactacataagcgagaagctgcgcgggtggatcagtcgcagaacgggagataacagtgaaaatcagtcctga

SEQ ID NO: 710 - DNA, 453 bp, Kosakonia cowanii
  source 1..453: mol_type = genomic DNA
atgaacccgatcaacttcataaagaactattcgcacgtcattgttattggcctgatttgcgtggcgctgtgggggctgaatgcccgtaactcccagttaacagccactaatgatcggctggaaaaactggcgaacagcaaagacgaccagattaacgatctgcgctcgaaaaacgacggcctggccgccagcgtgggcgaactggttaccgccgtcaggcagcagaaccaggtgatgtctcaggtcactgaacagcgcgctgtaaccgcacagcagaaccggaagctacagaatgaaattaagcaataccttgaagctgataagtgtgcccagtctcgcgtgcctgacaatgctgctgaccggctgcgcgccgcagcaaaagccgctggtggagtaccggacaataagccagccgcaaatcagcctgccggcagagctgacctcccgcattga

SEQ ID NO: 711 - DNA, 549 bp, Kosakonia cowanii
  source 1..549: mol_type = genomic DNA
atgcgaatgactgccaaagagctgatcgccgatgccagactgacaggccctactctgccaccagcagtagcaaagttaatgaccgctatggcagaccgtctcgatctacagttcgtggcgctgtgcgaatcgcgtaatgaagtgaagcagctggctgcggagaatgcggcgctgaagtcgaacctaatgttttgggatgcagaagatcctgaagtgccttattgcagccctgaagatatcgccaatgaaatcatgctcggctacaacgaggaatttgatgttcaggttgcggccaggcttcctaaccgtaaataccgggtgtgcaagctcactgagtcggagcgcgagattgaattagtggatggtggcgatattgcaacccccgccaccgacgcatacaccgcccccctgcgcgcagaaggggtagatggtgcaattgaaaggattatggttcatacgaaccatcaacacgcaggggttgctcaggccttgcacatcctccgcatgtacgccgcccagctccgcagcaaatctgaggtgccgtcgtga

SEQ ID NO: 712 - DNA, 1269 bp, Kosakonia cowanii
  source 1..1269: mol_type = genomic DNA
atgctttataacagcggcaccatcgcaattaacggaaatacggcaactggcaccggaacaaactggactgcaccagccagccaggttcgcgctggccagacgattatcgtcatgtctaatccggtgcagttgtttcagatttcatccgtaaacagcgccacgtcattgacggttacgcctgctgcttccccggcgctgagcggccagaaatatggaattcttgtctcggacattatctcggttgatgggctggcacaggctatgtctcaactcattaaagagtatgacgagaatattagcggatgggaggcatttgccaccactacagcaaatcagaacatcaccgtcaccatcaacggtgccaccgtgaacattccaggaattggagggctggcccgaaaggggacaaatagcgatattactgagctgaaaggcctgacaacagctatcacgcttgctcagggcggtaccggcgcaaagacggcagcaggagcacgcaccagtctggggctgggaagtatggccacccagagttctgacgcggtaaacataactggtggatccgggacattcaccagccttagctctgacgcggtgaccatcaccggtggaacagcttctcttggcactatcgagacaaaagcgggtgcggagcagccactggtaatacgcaccaatccgagtgggcttgggtatatacgtttcagggatgcgtctgaaaatccactggcttatctgggattcggggcgagtggtgcccagcactttattctggcgagcaacatcggaggaaacagcgtcacgctgaatactaccggcgctgtgacagtaaaagcagggggcgctaactacgctttccagacaaacggaaccgctacagggcagctgtggcagagcacatccgatgtcaggatcaagaaggatataaagcccatcaccaatgcgcgtgaggtaatcagtgcaatcaccgggtataccttcaagaagagatacaacctctatgaagtcgccgaaccgctttataccgaagaggcggggatccttgcccaggagcttgagctggtggctccggaagccgtctcaaaaaatgatttcggcgcccacgacctcgaaaacaatccgattgatgatttacgcgcggtcaactatgcggggatcacaccctacctgatagagctggcgaagctacatgaggccgagattactgatttgaagggagaaatggcacagcttaaggcgctcgtgtctgcgctggcgcagggctcttga

SEQ ID NO: 713 - DNA, 711 bp, Kosakonia cowanii
  source 1..711: mol_type = genomic DNA
atgcgtcagaaaaccattgatgccattctggcacatgccgctgctgaatatccgcgcgagtgctgcggcgtggtggcacagaagagccgtgtcgaacgttatttcccgtgccggaatcttgctgcggcgccggaggataattttgttctttgtccggaagattacgccgctgctgaggactggggtacggtgatcgccatcgcacacagccaccctgacgccacgacacagccgagtgaactggataaagcgcaatgcgatgcaacgcttttgccctggcatatcgtgagctggccggagggggatttacgcaccatccagccgcgcggagaactgccgctgctggagcgaccgtttgtactcggtcacttcgactgctggggactggtgatgagctattaccggcagatgcatgggattgaactgcacgattaccgggtggattatccgtggtgggaaaaaacctatccggataacttttacgaggaatgctggtacgagtgcggcttccgtgaatttaatgggccgccgaaaccaggcgatatggtgatcatgcaggtccaggccgataagtggaatcacgcggggatcctgctcgaaggaaacatgttgcttcaccatctttacggacatctgagccagcgtgtgccctatggtggctactggcaggaaagaacaatgaagattcttcgctatacatctctgtgctaa

SEQ ID NO: 714 - DNA, 342 bp, Kosakonia cowanii
  source 1..342: mol_type = genomic DNA
atgatggctattgaagaatttacgtggtgcccacgtattaatgcgcagcaggaggtgacattccggacgcgcaccgcgcagttcggcgacagctataagcaggtgtcaggggacggactcaatcccagaacgcaaaaatggacaatggagtttaccggcgatgaaggctatatcgcagaaatcaaagcatttctggatcgccacggtggcacccggtcattttcgtggcgcccgccgcttgagccgctgggactctaccgctgcaacacctacacgccgacgccgcttggcgccagaaaatataacctctccgcaacttttgaacaggcgtttgcaccatga

SEQ ID NO: 715 - DNA, 1872 bp, Kosakonia cowanii
  source 1..1872: mol_type = genomic DNA
atgacgttctggggcaacaacatgttcaacgttgtctctgacatgccggcggatacgtcgaaactgcagatcctcaaccgcgcagcagtgatcggcaagccggtctactcaagtggcagtgaaaagacccgtttttccagcgcgctgattaatttcagcgacccggacaatcactatcaggatcgaactacggcggtgatgttcccggacctggtgaaacagttcaagtttaagcagacgcaaatcacagcgatcggctgtacgcgagaaagtgaggctcagcggcgtggtggttgggcggtgtattccaactctcttgaccgcattatcaccctacaaactgggcttgatggctatgtctatgtgccgggcacggtgtttgcctttgccgatgaacgcctttctggtcgcgtgtacggtggtcgagttgccgcgtacaacggcgggctgaaggctgtgacaactgatcggggcaccagcgcggttgctggcgacacgctgatgattcgcacgcaggggggaaccgtcgaaagtcgggttatccaggctgtaaatggtacgcagcttgtggtgtccacgcccttcaaagcggaccctttgccgaatgcagtgtttgttatagacgccgggcagttgagattacagtactttagagtaactaatctgacgttcaatgatgaggaaaatacgtactccattactggggcggaatataactcctctaaatatgacgcggttgataataatgcccgactggatacgccgccaaccagcctgattccgaccgggcttgttaatcagccgactaatatccaggtctcaagctttgaatccgtaagacaggggcagcgaattactacactgatcgcatcctgggatgcgccactggataaaaatggcaagcctcaggctgatgttatctcataccaagtgcagtggaagcgtggagataatgaatggattaatgtgccagaaacaggactgcgcaatatagaagtgcccggcatttttgagggtgactatcttgtacgcgtgcgtgccatcaactcaggaggggcttcaagtctgtgggcctcttcactgctgacacacctcaaggggcgcgcgggcgatgttccaaagccggtaggtctgtctgcgtcagaggatgtcgtattcggtatcaatgtcacctggggttttccggaagatactggcgacacgctgagcacggaactgcagtacagcctcgctggggacggctcaaacccgatgctgctggcggctgtaccttacccgcaaaaactctaccagcagatgggtctcaaggctgggcaggagttttggtaccgggccaggcttgttgaccgtaccggcaatcagtcagcctacaccgactgggtacgcggccagtccagctccgatgtgacggacattacagaggctgtgctcgcgcagatcaaagacacccaactgttcaaggaccttattgaaaacgctgttgaaagcagcgcgaaggttgcggaactggctgaagcggtgcgggagaacgcggccggtctggccgcggctgccgggtcgaataagcagatggcggaagccattattggcaatgctctggcgatcgcggatgtcgtcgtgcgccagtcagcccagcagggtgctaactccgcgaaattcgagcagctgcgcgaggtgagcaggtcaaaactgccgcccgccacaactgtactggcgggcgggtattttcagctaaataattcttcaataaattcgtcgaatgaatcagcaacagtgacaagctccttttcatccataagaaaaatgaaaacctccccgaaagaattcccctctttcagtgacaacaggaaacagttccccccctcatcataa

SEQ ID NO: 716 - DNA, 3336 bp, Kosakonia cowanii
  source 1..3336: mol_type = genomic DNA
ttgattgcgctgggggagggggaattctcaggacagttaaccggcagggacatttaccttgatggtaccgcgattgagaatgctgacggcacgcagaactttagcggtgttacctgggagtttcgtgccggcacccaggcgcagaaatacattcagggaatacccggtaccgaaaacgaaatcaatgtgggtacagaagtttccagctcgattgcctggacacgtacatttaccaatacccagttgtcagccgttcgcctgcgcctgaagtggccctcgctttttaaacaggaggatgatggcgatctggtgggaaattcagtcaaatatgcaattgacctgcagaccgacggcggcgcatggcggactgtactgaataccagcgtaaccgggaaaacaacctcaggttatgagcgcagccatcgaatcgatctccctcaggcgggcagcacctggacaattcgccttcgaaaaatctctgctgatgcaaacagcgcgaagatcggcgatacgatgctgctgcagagtttcaccgaagtaatcgatgccaagctgcgctatccgaacaccgcgctactgtatgtagaattcgactcaagtcagtttaatggctccatcccgcagatttcctgcgagccgcgtgggcgcgtaatccgcgtgccggatacctatgatccggaaacccgcatctatagcggtacctggacgggcgcttttaaatgggcgtggaccgataatcctgcctggatattttatgatctggttgtatctgaccggtttggtctggggcaccgactcactgcggcaaacatcgataagtggacgctgtatcaggtggctcaatattgcgatcagaaagtgccagacggtaagggcggcagtggaaccgagccacgctacacctgtaatgtgtatgtgcaggatcgcaatgaggcttatacggtattgcgtgactttgccgccatattcagaggtatgacttactggggcggtgatcaaatcgtcgcgctggctgacatgccgcgtgatgtggattacagctatacccgcgctaacgtcgttggcggtcgtttcgcctattcgagcagcaccactaaaacccgctacaccactgcgctggtttcatggtccgatcctgataacgcctacgccgatgctatggagcctgtctttgagcaggcacttgttgcgcggtacggcttcaatcagcttgaaatgacggctatcggctgcaccaggcagtcagaagcgaaccgaaaggggcgctggggtattctgaccaataacaaggatcgcgttgtgtcgtttgatgtcgggctggatggaaacattccgcagcccggttacatcatcgccgtggctgacgaaatgctgtctggcaaggttatgggtgggcgcattagcgccgtcaacggcagggttatcactctggatcgtaaacccgatgccgtcgccggcggtcgacttatcctcaacctgccttcgggtgcttctcagagccgtaccattcaggcggtaaatggtagatcagttacggtgacgactgcttacagcgagacgccacagacggaagctgtctgggttgttgagtcaggtgagctatatgcacagcaatatcgcgttgtgagcgtaagcgataatggtgatggtactttttcgatctcaggtgcctggcatgatccggataagtatgcccgcatcgataccggagcggtcattgaccagcgaccggttagcgtcattccccctggaaaccagactccaccggccaacatcgtaatcagctctttctcggtggtgcagcagaacatcagcgttgaaaccatgcgggtgagctgggatcaggcgctgaatgctatcgcctatgaagctcagtggcgacgcaacgacgggaactgggttaacgtgcctcgcagctctacgacgtcattcgacgtgcccggtatttatgccggtcgctatctggtgcgtgttcgtgccatcaatgccgctgaaatttcctccgggtggggctattcagaagaaaaaacgctgaccgggaaagtgggcaatccgccgaagccggtgggcttcatcgcttccgaaaacgtggtgtttggtatcgagctgaactggggcttcccggcgaataccgacgacacgctgaagacggaaattcagtacagcctgaccggcagcgatgacgatgccatgctgctggccgacgtgccttacccgctgcgcagatatcagcagatgggacttaaggccgggcagattttctggtaccgcgcgcagctggtggaccgtaccggcaacgaatccgggtataccgactgggtccgcggccagtccagtattgatgtgtcggatatcaccgatgcggtactcgggcagattaaggataccgagctgttcaaggaccttattgaaaacgctgtggacggcagcgagaaaattgctggcatggccgacgatattaagcagaacgcagatcagctggagctgcaggcgcaggctatcaaagagagctctgatggcctggcgcaggctgaggtgaagattgacgaactgtctgtctctatggacggaatgaccgggggggtcaaaaattcctcgatagccatcattcagaacagcctggcgcaggtcacaagccgtcgatctcagactgcctcgaatgccgggaacagcgccagcatcgaccgtatcgacaccaccatcgcagataccagccaggcggttgcccgcgcgctggtgacgctggatgcctccgccggcggcaatgtctccagcgcaacggatctgacagagacacttgccagcttcactcaggcctcggccacgaaaatcaattccctgacggtgacggtaaacggccagcaggcgtcaatcatccagaatgctcaggtttcggccgacatcaacaataacctgaatgcgatgtacagcatcaaggtgggcgttgatgccgctggccgccagtacgctgcgggcatggggctcggtgtgcagaacaccccatctggcatgcagtcgcaggtcatttttctggccgaccgtttcgctgtgatgtcgcaggcaggcggaacggtgagcctgccattcgttatccagaacgggcagaccttcatccgggatacgttcattcaggacggttccattgagaacgccaaaatcgggaattatatccagtccaataactatgttgctggctctgctggctggaagcttgataaagggggaacattcgaaattaacggtgtggccggaggcgggaggatgctgatatcgagcacccttatccgcatatatgacagcaataacgtgttgcgtgtaagaatggggttatggtga

SEQ ID NO: 717 - DNA, 756 bp, Kosakonia cowanii
  source 1..756: mol_type = genomic DNA
atgagtttaaacagtgattaccagaaacttgaaccgggtgatgaggtcaggctttttgaggtcgacggcacggcctttggtacaggcgaagttcttcgttttcacagctacagcctcgcgtataccgaggctgaaattgccgctgccggcggaaatgaaaaaaagctgcctgcaaaatcaatctggtggcaaggagaagagtataaagcgtggccctgcaggattgagggcattgaggcatctaccagcgggagcagcgcgcagcctaaattatcagtagcgaacctcgacagttccattactgctttgtgcctggcctatgacgatatgttgcaggcgaaggtgactatccacgataccctgggcaagtacctcgatgctaaaaacttcgctggcggcaacccttcagccgatccgacgcaggaaaaacttaaggttttctatatcgatgccaagtccagcgaaaccaatgagatggtcgagtttacactcgccagcccgatggacctgcaggggctgttgataccgacgcgccagctccactccctttgcacctggtgcatccggaataagtaccgcaccggcgacggttgtgactatgccggaacccgctatttcgacaaaaacaataatcctgtcagcgatccgtcgctggatgagtgcaacggtacactgacggcctgcaaactgcggttcggtgaaaataacgagctctcgtttggtggcttcccgggcacgtcgttgatcaggagctga

SEQ ID NO: 718 - DNA, 603 bp, Kosakonia cowanii
  source 1..603: mol_type = genomic DNA
atgaacgaaataatgactcaaattgaattgagtggagtattaggaaagatctttgggaaaaaacatcaacgtataatttcaaccccacttgaagctggtaaagctttagctgcaaccatcaaaggttttgaacaatacatgataagcagcaagagtcggggtttgacctatgcaatatttaaagataaaaaaaacataggaatagatgatctaggttacccggttacaggggaggtaattagaatcgtccccgttattattggtagtaaaaaggcagggttattgcaaactatccttggtgttgtgattgtggccgcagctgttatttccggaccagtgggtttggctgcattatcaggagcccaagcgtttagcattggagctattggtgcttcgatggctttaggtggagttatccaaatgctttctcctcagcctactgggttagccagtaaacagagcgcagataaccgcgcatcctacgctttcggtggagttacaaacactgcagcgcagggctatccggtaccgctcctttatggacggcggcggataggcggggcgattatttccgccggaatttacgtcgaagaccagcagtaa

SEQ ID NO: 719 - DNA, 759 bp, Kosakonia cowanii
  source 1..759: mol_type = genomic DNA
atgaacctcgaatcattaccgaaattttattccccgaaatcaccgaagcttaacgatcagacgccagccaccggcggtgtcgcgctgactatcaccgatgtaatggcagcccagggcatggtgcagtcgaaagccagtctcggttttaatctcttcctggcgaaaatggggattcaggatccggcacctgctattgatgggctgatgcaatatgcgctggcgctgaaaaatccggtgctggggaagctgagcgagaaggcacgcggtgaagttctgcaagtgctggtgcagtttgcttatgcagattattcgcgttcggcagccagtaagtcgacctgcccacattgcgaagggaaaggcgtggtgcgggaaatgcaggacgtggttaagcaccctggcgttaatggcgtagaggcaacggttaagcacgaagccgtagaagtgatctgccagcactgcgctggaaaaggagagatggctacggcctgccgcggctgtaaaggtaaggggaccgtgctggatgagaagagaaccaaactccacggcacaccagtcaggaaagtttgcggtcgttgcaatggaaaccgcttcagccgtttgcctacaacccttgcgcgggcgcgaatagagaagattatccctgatctgaccagctaccagtggtacagcggttatggcgatgtaattgcgcttctggtgacaaaatgctggcaggaagaggcttttgccgaggggcaactgcgcaaagttacaagatag

SEQ ID NO: 720 - DNA, 1128 bp, Kosakonia cowanii
  source 1..1128: mol_type = genomic DNA
atggctgccagaccacgtaaaaataatatcagcgtaccgaatctatatccgctgtatagccggaaggtcaataaggtttactggcgttataagcaccctatcacgggaaaatttcacgcccttggtactgacgaagcagaggctattgcaatagctaccgaggcgaatactcgcctggctgaacaacgctctcgccagatcatggcgattagcgacaaaatcgcgaccagcaaaggtaaagctataaccacaaacacctggcttgaccgttactgggatattcaaggtgagagactggatagtggcgatattaagctgaatacatataagcaaaaagccaaaccagttgctttgcttcgtgagcgggtaggtatgaagctgatttcggcggtgaatgtgcgggatatagctgaaatactcgaagcctacatttcagatgggcaacccagaatggcgcaggtgatacgctcagttttaatcgatgtatttaaagaagctcaacattatggggaggttccccctgggtacaaccctgcccttgcaacaaaacagccgcgccgacgtataacgcggcaacgccttaatctggaagagtggcagaaaattttcgatattgccgacgcaaaccataagtatatgggtaacgctatgttgttagcccttgtgactggtcagcgtttgggggatatctcaaacatgaagttcagcgatatttgggacgaccatctccatattttacaagagaaaaccgggagcaagatcgccattcccctcgcgctgaggttaaacgcaatcaactggagcttgcgtgaagtagttgcgcggtgccgagattatgcattaagtccgtatctggttcactttttccgcgccacttctcaggctgaacgtggtgcgcaagtaaagtcgaataccttaacgatgaatttcagtaaggcgcgggataaagcaaaaattgactggggcgacggcactccggcgaccttccacgaacagcgatctttagcagaacgcctttatgagactcaaggtgtagatactcagaaattgttagggcataaatcacctaatcaaacggctcgctatcacgacgatcgagggaagggttggacaaaaattgagttataa

SEQ ID NO: 721 - DNA, 1083 bp, Kosakonia cowanii
  source 1..1083: mol_type = genomic DNA
atgcagaggccagcccgttacgacgctaacctgccccgtaacctgacctttcgcaaaagagataagctttattcctggcgcaacccaataaccggccaggtaatctatctgggccgcattgatcgcagggaagcgatagcccaggccattgaagccaacagctatcttgatcaaaactatatcccctccagtctacttcagcgcattaaagaaacgcccaccctgactatggctaaatggctggagaggtatgacgttattctcgagcgaagggaattaaaaccaaacacaatgaaagttcgcaggaaccagctggagacgatcagaaaagagttcggcactatcgctcttagcgcagttacaacaaaagacattgcggaatttttggaaacatacattgcctgcgataaaaaaagcatggctgcaggtctgagatctgtactgctcgatgtattcagagaggcgctcgtggagggccatatagaaaggaacccggcagaacctactcgcaccccggcaccaaaagttaagcgggaacgtctactgctcgaagcgtattttacgatacgagaaacagcagctgctaattcagtatgggcggcaaatgcatttgatcttgcgctggtcactgctcagcgacgcgaggatatagccatgatgaaattcactgacatccgggaagacagattgtttgtcatacaggagaaaacagggaataaattagccatccctttagacctgaaactggaagcggccgatcttcatttaaaagaagtgatagaacgttgcagagtgaacaatccatctgagttcctgctttactcgccggtgcgtcggggtggaagaaagcccggaccactgacgccggacgggttaacccaggcattctcagatacccgtgatgtcactgtgcttaaatttggcccttacccgccgtcatttcacgaaattagaagtctggccagtaggctttatgagaaggaaaaaggcgaagaatttgcgcagcggctgttgggtcataaaaatttatcaatgaccaaaaaatacttggactcccgtggggcagagtatgttacggtttag

SEQ ID NO: 722 - DNA, 360 bp, Kosakonia cowanii
  source 1..360: mol_type = genomic DNA
atgaaacgtatgccggacaaagacgctggtttctgggcaagtcttatcgcctggctatacagccacaaaacagaatggggatatgcaggtgtggcgggcatgttttctttgctgcgcagcgcctatgcacagtcttcatggagtaagcgtgtcctcgacgccgtatcttgcagcgccctggcattcttcgccgcgccgacgcttcaggtggtcgggggcgttcttaactggaacgtgcctgatacagccgctcaggtttttgcggtgtacatcgggtatgtcggcaatgactacatcagcgagaagttgcgcgggtggattagccgcaaaacgggagataacagtgaaaatcagtcctga

SEQ ID NO: 723 - DNA, 1611 bp, Kosakonia cowanii
  source 1..1611: mol_type = genomic DNA
atgccccaatcggactggggcgagcttcagcaacggttcctgtccaaacatgccacaaccggcgtatcaccgaaggaatggtgtgaaacgcagggactgaattacgctactgcccgccgatacatcaagaaaccatctgcgcaaagtgcgcaaaaatctgcgcagaaaaaaatgcgcgctgcgcaggaagataaaagcgcaaatgagctgatggatgatgatggacttaccgctcagcagcgcttatttgtcgcggagtacctgaaggacaacaacgccaccgctgccgctgcacgtgctggatacagtgacccaaactacggtcgtcagctcatagcgaatcctaacgttgcgcaggctattgcgcagcagcaaaaagcttccattttgcgcacgcttggcagtgctgatgaggtgctggcgcagatgtggcagctcgctacttttgacgctaacgagctctcgcaatatcgccgtggtgcgtgccgctactgtcatggcttcggtcataactatcaatggcgcgatatggtggagtttgaagagcatcggcttaaagcgatcgagaaaaagggtaaagatccggtagatgtcggcggctatggctatgaccacaaccgggaacctaatccggcatgccctcgctgtaatggtgacggcatcggccagccgtatttcgctgatacccgcaagctaccgcctgtttcccgcctggcttattccggcatcaagctcggtaaaaacggcgttgagattacagctatcagccgtgagcgcatgtatgaagccgtaatgaagcggcttggcctggcggacagcgagtttgcgcagcagctgcagcagatcgaaatcgaacgtcgccagctggaggtggaaaaactccgcaaagagctggcagcagatccggaagatgaggtaccgatgcccgtggcaattaacattaacgtcgcggatgctcgcgtaaggaaagacgatgacggggataacgagttctccgaagtgattggcgttgatgttgctgacgctaccctggaaggctacgtgaaatatggccttaaggcgctgacggcggcaatcggagcaaacaccgatatggtggtgaccgccgatatcgaaaccgacgggaagaaaaccctgacgcgcggcctgcgcaaatacggggacaaattcaaccgtgtagtgctgttcgttatgcattccgccacctacttcgacattgtggacgaggcgatcgccagcaagatatacgaagaagcgggcgtggtggtgtacggcggccagccgggtaccttgggtaagcccgtgctggtgaccgataccatggatgccgccgctattctggggctggtggccggtgctgtgaccgtgactgaatcccaggcgccgggcttccgctcctacgacatcaacgatcaggaaaaccttgcggtcggctatcgcgcggaaggtacagtcaacgttgagctgctgggctatagctgggacacggccaaaggcgagaacccggatctgaccgccatcggcacggccgctaactggaaaaagcatttcacgagcaacaaatccactgcgggtgtgctgatcaagctgggggccgcatcgggggagtaa

SEQ ID NO: 724 - DNA, 1077 bp, Kosakonia cowanii
  source 1..1077: mol_type = genomic DNA
atgcagaacacaaacgtagcagtagccgaccagaacgctgtcattaactcaaacatcgcgctgttcgattcacagtaccttaatgccatcagcactttcgcccagattatggcgcagggtgcggcgacagtaccgaaacaccttcagggcaaccaggccgactgtatggccgttgcaatgcaggcggcgcagtggcaaatgaaccctttcgccgtggcgcagaaaacccatctgattaacggcgtgctgggatatgaggcccagttggtaaacgcagtgatttcacgcagcggcgtgctggcgaatcgctttgagtatgagtggtacggcccatgggaaaaagtggtcggaaaatttcatatccgcaaaggtgaaaaaggcgaataccgcgttcctggctggaccatggcggaagaagcaggtatcggcattatcatccgcgcaacgctcaaaggcgaagatcacccccgtgagctggatctgctgctggctcaggcccgcacccgtaattcgacactgtgggctgacgatccccgccagcaactcgcctatctggcagtaaaacgctgggcgcgtctgttctgtccggatgtgatcctgggcgtttatacacctgatgagcttgaagatcgtcaggaaaaagaaatcaacctagcaccgcagcagcgcgtaagcgttgctgatatcccggctgaatcgacaactaacagcgcgcaagagtccggtaccaatattgatggcatggccgacgagttccgcgatcgcattgaagtagctcaatccgtggaccaggccaaagccgtgcgggttgatattgaagcagccaaaactactctcggttcggcgctgttcactgagctgaaaaacaaagccgtacggcgctactacctggtagacgcccgcaacaaggtggaagcggcgatcaactccctgccccagcctgacgaaccggatgctgcagagcagtttaccaaagcagagcaggcactggctgctgcgaagcgccatctgggtgacgagctgtatgaccagtttgccgttaccctgctcgatatgaagcccgaatacgtggcatga

SEQ ID NO: 725 - DNA, 1206 bp, Kosakonia cowanii
  source 1..1206: mol_type = genomic DNA
gtgaaggatgcccgtgtctccctgatgtatttcgaagcgcgccatgtttccaagaccatccagaaggagcggtcgaaggttctcgacatgggcaatctggtgcatgcgcttgcgctgcagccggagacgctggccgccgagttcagcattgagccggagatcccggaaggtgcactcaccaccacggcgacgatccgcgagtgcattgacgagtacaacgccagcctgccgccgcagctgagcgctgatgatatcaaagcgctgctggaggcccataacgccaccctgcccgcgctgctgccgcttggcgcagctgtagacgaaaccgcagaaagctatatggcgctgccggaagagttccagcgcatcgagtctgataagaagcagaccgctgcagctatgaaagcctgcataaaagagtacaacgccactctgcccgctccggtgaaaaccagcggcagccgtgacgcgctgctggagcagctggcgatcgtcaatcctgacctggttgcgcaggaggcgcagaagcccgcgccgctgaaagtgggcggcaccaaagtggatctgattcaggcgctcaaggctgtccgcccggataccgtgttcgccgacgaattgttggacgcatggcgtgagaacccggaaggcaaggtgctggtgacccgccagcagctggaaaccgcgttggctatacagaaagcgctgcatgcgcacccgaccgccggaaagctgctgcagcatcctgatcgcgccgttgagacaagctatttcggcatcgacgaagagaccggcctcgaaatccgtgtgcgccctgaccttgagctggacgtagatggcgtgcgcatcggtgccgacctcaaaacgatttctatgtggaacatcaagcagtcaggtctgcgggcgaagctgcaccgtgaaatcatcgatcgcgattaccacctgagcgccggtatgtacatggagacggcaagcctcgaccaattcttctggatcttcgtcaacaaggacgagggatatcactggattgccattgttgaggcttcgcaggagctggtggagctgggcatcctagagtaccgcgccacgatgcgcgccattgccaacgcattcgataccggcgagtggccagcgccgatcaccaccgactacaccgacgaactcaccgagtacgatctgcgccgccttgaagcgctgcgcgcggcttaa

SEQ ID NO: 726 - DNA, 597 bp, Kosakonia cowanii
  source 1..597: mol_type = genomic DNA
atggcgcagttacaactcattaagcattcttctaatatcctgatccccgccacgccggagaccagcgattttctgcaatcaaaatgtaagctcggcgccgtgctggtggccgatttcaaacaagtccgcaacccggcttttcaccgtcgtttcttcgctttgctgaatctcggcttcgaatactgggagcctaccggcggggcgatctcctcaaatgagcgcaggttggttaccggctacgctaaatttctggcctcgtacggtgggagtggggaggcgctgctggatgccgcagagcagtatctatcgcgcattgccgatcgccgttccggtagcatcagcgtatgcaaatcgtttgatgcctaccgcgactgggtgatcgttgaggctggccactatgacgccatccagctaccggatggaaccctccggaaacatccccgcagcatcgccttcgccaatatggacgaaaccgagtttcagcagctctacaaagctgcgctcgatgttctgtggcgctggatcctgtccagggcattcagagaccagcgtgaggctgagaacgctgccgcgcagctgctgagcttcgggggctga

SEQ ID NO: 727 - DNA, 807 bp, Kosakonia cowanii
  source 1..807: mol_type = genomic DNA
atgttttcaaagtttatttttttatttgccattatctttgcttcatctattaacgctgcttcgtttgattgccaaaaagccacctctgtttcagaaaacattgtctgctcaaattatgaactaaataaacttgatgaagttctgggaaagaattatcaactcatgctgcgagctacagctgataaagaaactatcagtgaaggtcgtagacagcaggttttatggtttaaagaaaaagaaaaatgttctgatgcacaatgcttgcggagtgcttatattcagagaaacgatgaaatttgcgagtttattcttgatagaacaactgggcctttcgaatgcgtcagtacttcgtctgcaattcagtcaattcaaaagcaagagtacgatgagtcacacagcaagagcccagaccaggtagtacaagaaatttatgcccggcatgcacagcaggttgcttcattaggcttctctgaaagagagctgtcttcttggctttatttcacagttcaggcgggcgcaccgtatcgcaagttttcaactcttggacagtatcttgccatgatgtatgagctcgacggatttaagagcatctcaaaagttgatgacggtgagcattttggttttaaggttaaagtgtctgggcaacctagctctggatttgtattccatttggaagatgatgaatattatctcacaggcataatacagggagacgaaatttacgtggccccacagaacatacagatatccaacctgttttatagctacggagtttatgcacttggcaagaatggagctgctctttga

SEQ ID NO: 728 - DNA, 270 bp, Kosakonia cowanii
  source 1..270: mol_type = genomic DNA
atggcaaagcttcttaatttgcaggaatgggccgctgaagtgtactcatcaccgccatcgctttctactcttcgcagatgggtacgtgaaggcaagatctatcctgcccccgagctacacggtaaagagtataagctccgcccggatgctatctatgttgatccgagcaagaagaatttgcgcttaaaaccgcagcatctaaaaattccgtccaaagggactttactggagagattacagaatgcagaggccagcccgttacgacgctaa

SEQ ID NO: 729 - DNA, 546 bp, Kosakonia cowanii
  source 1..546: mol_type = genomic DNA
atgcgaatgaatgccaaagagctgatcgccgacgccagagtgacagcccctactctgccaccagcagcagcaaagttaatgaccgctatggcagaccgtctcgatctacagttcgcggcgctgtgcgaatcgcggaacgaggcaaagcagctggctggggagaatgctctgatgaagtcggctattaagactcacagcgaatcggtccacttctgcgtgggttgtggaaaagatgatccatgcagcaatgacgatatttgctatgcactcgaagaaactccagccactgatgcattcctcgccacccttcgcgcagaagctcgcaaacagggcgctgtctttgcagcaaacagaatgctggcagcctgggatgctggtttcgttgaagacacaccagaaaacgcggcagatatcgcccgcgcaattctgatgtctacggaatttatggacgaagcacccgatggagatttcgatcgttctttcgctgatgaaatgctggaggccatcgcttcccagcttcgcagcaaatcggaggtgccgtcgtga

SEQ ID NO: 730 - DNA, 993 bp, Kosakonia cowanii
  source 1..993: mol_type = genomic DNA
atgatttacacaactggctccatcgcggtcagcggcaacacgctgaccggcaacggcacgaatttcacacaggcaggctctcttatccgtaacggctgcacggtcctggcactgaccagcccggcacaggccttccagatcaccgccatcaacggcgcgaccagcctcacggtgaccccggcggccagcccggcggttcccgccggcacttcgttcgccattctgctgagcgacagcctttctgttgacggcctggcgcaggatatcgccgagacgttcaccatgtaccagcgttatatggggggctttgctgacgtgatgaacggggccggcgatgtgaccatcactatcaatggcacgcctgtgaccgtgcccggccagaagtcgctggcaaagaaaggcgccaacagcgatatcacctccctcagcggactcaccactgcgctcagcatcgcgcagggcgggacaggcgcaaaggatgctgccggggcgcgtgcagcgtttgatctggacaatctgtatctgcgaggagaccgaaacctttcggacgtcaaaagcaaaaagaccgggcgcgataacctgggcgtcaatgcgagtcccaatatgtggtacgtgtggcaaaacccgaatgtcacctcgcggctgactttcccctcctgcaacagcgcggagggagaaatccgggtacgcatcgccaaagacgggatcagggtgaagggcatcctgcggtacccggcgggcacgatgacgaacggtaagaccatcatcacctgccagccgattgatattgatggcaatacgcggaccggtctgaactccacatttgccacgggctatgtgcagtattcgaacgggacgatgggcacggccatcttacaggcggtggataacagcggcggcatcccggtcgtgatcgcctccaccgacgggctgaatatcaactggataattttggatattcatttcgcgttcacatcaacatccggagcataa

SEQ ID NO: 731 - DNA, 711 bp, Kosakonia cowanii
  source 1..711: mol_type = genomic DNA
atgtgggacaagacaatcagcgcgattctggcgcatgcggcgcaggcgttcccggctgaatgctgcggtgtggtgatccagaagggacgagttgagaagtatgtcgcctgccggaatctggccgcctccccggaggagcagtttgaactgtcgccggaggattacgcggcagccgaagagcagggcacggtggttgcagtggtgcacagccaccccggcgacggtgccacgacgcagccgagcgagatcgacatgctgatgtgcgacgcgaccgaagtgccgtgggtgatcgcttcatggcctgaaggcgatatccgcaccatcatgccgcgcggcgatcgcccgctgaccgggcgtcagtttgttctcgggcacgctgactgctggtcccttatccgggattacttccgcacagaacacggtatcagcctacccgattacagcgttgagcgtcactggtgggaggagggtgaaaacctctatatggataactggcacgcatgtggattcagggagttcgacggtcccccgcagcccggcgatatggtcatcatgcaggtgcaggccagcgtgccaaatcatgccggcgtcctgctggagggcaacatgctgctgcaccacctgtacggtcagctcagccagcgtattccgtatggcggctattaccgtgaccggaccattaaagttttacggtacaaggacctgatgtga

SEQ ID NO: 732 - DNA, 339 bp, Kosakonia cowanii
  source 1..339: mol_type = genomic DNA
atggtagttgagaccttctcctggtgcccgaaggtggcggcgcaggcagataccagtttccgcatccgcaaagcgcagttcggggataattacgcacaggtagccggggacggcatcaacccggtcaccccgcaatggagcgtgagtttcaccggggatgaagcgtatgtccaggccataaaggcgtttctgaagcggcatgccggctggaagtccttcatctggaagccgcccctggagcctgcggggctatggcggtctgaatccctccagatagccacccacggcaatgacaaatacaccctcagcaccacattcattcaggcataccatccatga

SEQ ID NO: 733 - DNA, 3492 bp, Kosakonia cowanii
  source 1..3492: mol_type = genomic DNA
atggcaacgcttcgcgaacttattataaaaatttctgcagactccagctcattccagagtgagatcacccgcgcctctcgcatgggctccgactattacagaacaatgcaggcgggaggccgccaggcggcggcggccgctaaagaaagtgaaagggcgttatctgatctcactaatggttttgcctcagcaggtaaagccgcagctgcggcaactgcggcttttgctacagggaagctggtgcagattgcagacgaatggaactcagtgaatgctcgtcttcaacaggcttctgcttcggctgatgattttgccacttcacaacgtcagcttatggaaatcagtcagcgcacgggtacagcgttctctgataatgccaacctctttgcccgcgcagctgcatcgatgcgcgaatacggctatagctcggaagaagtgctcaaaatcaccgaagccgtttcaactggccttaaactttcgggtgccagtacagctgaggcaggttcggttatcaatcagttcagtcaggcactcgcccagggcgtgctacgtggtgaggaattcaatactgtcaacgaaagcggcgaccgcgttatcagggcgctggcggctggcatgggcgttgcgcgcaaagatctcaagagtatggccgaccagggcaagctcactatcgataaagttgtgccagcgctaatgagccagcttgggacattacagggtgagtttgcaacgatgccgcagaccgtttctggctcattgcaaaaggtcacaaactcgttcatggggtgggttggaggtgttaacgcggcaacgggggcaacggatgcgctgtccggcggccttgatggtgtagcccagacactggactcctttacatcatccgcggtcagcggtgccctgagtgatgtggctgacaatatgtcagttatcactaccgtagcaggcgcgctggtgggtgttggcctggctaagtatcttagcggaattgttaccagcgccactagtgcgacaggtgctttgatctctgctgcgaaatcagaagttgccctcgctgttgcgcaagacagggcagcccagtcagctgtagcggcttccagagctgacgtctatcgtgcacagcaagctttgcagagagcaaagggcgctgacgttcaggctgctcagcaggaaaaaatagcagccgcagaggcaaaggtaacagcagcacaggccaggctcacgacggctcttgccggaggtacatcaacagagaaagtcagggcaagagcagcgcttgaacgcgctcaggcaagtcttgcagctgctaaaaatgcggacgtacaggcggttgctgaacgacgactggcacaggcagaggccgcacgtgacaggaacctggccaaccgtgtctcaacccaaagtaatctaaacagtgtcaccgctgtaggatcgcggctcatgagtagtgctctgggaattatcggtggtattcctggtctggtgatgcttggcgcaggggcgtggtatgcggcgtatcagaatcaggaacaggctcgccgttctgctcaggaatacggcagaacgatagatgagataagcaaaaagaccagggcgatgtctttgccggaagcttccgacaacagtgaaaaagccaaaaatgcccttgatgaacagaacagacttatcgatgagcaaaaaagcaaaattgaaagtctgaaagagcagattgccggatcgcagtatctaatcaacaaccccggcccgactacgaagggtggtttcatgatcaaccaccttacctctctgaagactgtaactgatgatctgtcgactgcaactgagcagttgtcggttgaacaggaaaggctttctcagatgcaggagaaagcagcctccattcaacaaactctcgaggggctccagtaccgtcgggtatcgctgattagacaggaagcggctaatcagaattctgcctaccagtctctgctgatgatgaacggccagcatcaaacatttaaccagctcctcgggctcggcaatcagttactgatggcccgtcagggaatgacactggcacccctgcgtgttcctcaggctgaagcctcgcagaaacagaccgatgcgctcgaaaaaagccgccgcgaactggccctgtcccgacttaaaggtgaggcaaaagagcgcgcccgccttggctatgctgctgatgagctcggtctgacggctgatccgcaattccagaccaaccggcttgagtacatcaataacgggcttgaagagtggcgcaataacgaggccaacaaaaagcagcccaaagggccaaagacggacgaagaaaaggccggtgatgcttataaaaggatgatcaagcagcagaaggagcagatcgcccttcagggccagagcaccgaacttgccagggtgaaataccaggtggttgaaggtgaattatccaccctggacaaggcgcagaaggctgaactgatgcgcaacgctgcgttaatcgatcaggtcaaacttcgcgagcagttgcgtaattacgaggcgaatctgtctgacagcaacgccagcgcccgggcggccaatgatgcgcagctcattggttacggtcagggcacccggttccgtgagcggatgcaggagcagtttaatatccgcaaggagtttgagcagaagaataccgatctgctccggcagcggcaggccggggatatagatgaaaccttctaccagcaggggctggcactcaacaaacgctatctggaagagcgactgcgcgaccaggaggggtattacaccgcttccgatgcgcagcgcggtgactggttaacgggcatgtctgagggctatgcgaactgggtggacgaggcgaccgactattccgcgatggctgccgacgggatgaaggaggccatgggcggggcggtgactaccattaccgacatgctcaacggcaatctcgacagctggaaagactggggcatgaacgtcctgaaaattatcgagaccgttctcgttaatatgatggtcgcgaatgccgcgagttccctcggctcgctcttcagctttggtgcttcatccgccgcaacggccagtagcgggacggccattcagagcgctgcctcaaactttaccttcaacgccaaaggtaatgtctacgactcaccctctctgagtgcatacagcggtggtgtctaccagaccccgcagctgtttgcttttgcgaaaggagccggggtttttggtgaggccggtccggaggcgattatgccgctcacgcgcgcagctgacggttcgctcggcgttcgcgcagttggcgcgccgcagttttccggcggcggcccgtccgtgtcgttcggcgatatcaacatcaatggcggtgcgcagtccacggcaggacaggggactgccgcaactgccggcaggcaactcaaggatgcaatcgtgaccgtaattaatgagcaggccagcatgcccggatcgccattgtggcggcttttgaaaggagcgtaa

SEQ ID NO: 734 - DNA, 3795 bp, Kosakonia cowanii
  source 1..3795: mol_type = genomic DNA
atgccgccagcaggcggctttttttatgggcgcgatatgacgaacacagcgattaaagggcggaagggtggtggtaccaagacccgcacgccggtggaagccccggacagtattcagtccatagccagagccaaaattcttgtcgcgctcggcgaaggggagtttgccggcgggctggacgggcgcagcatttttctcggcgacgcgtcatcgtataccccgctgcagaatgccgacggcagttacaacttcaacaacgtaaaatacgaatttcgttccggtacccaggatcagacttacatccagggctttccgggcgttgagaatgagctgcaggtcgcctacgaactcaaagctgccgtgccgtatgtccgctctgtctccaatacccagctttcagcactgcgcatccgcctgggctggccctcgctgctgacccagaaagacaacggcgataaggttggtacgcgcgttgagtatgccatcgacctgtctgtcgacggcggcgcatatgtaacggtgatcgacggtgctgtcgatgacaagaccaccaccctctatgagcgcagtcaccgtatcgacctgccgaaagccaccaccggctggcagctgcgcgtgcgccggataacgcctgactcaacgacagtgaacgttgtggacagtatgcgcgtcgaggctgtcaccgaaatcattgatgcgaaactgcgttatcccaacacggcgttgctctacattgaatttgatgcgaagcagttcccgaacggcatcccgcaggtcgtgtgcaatccgaaggggcgcattattcgcgtgcctgatacctacgatcctgacgcgcgaacctactcgggcacctgggaaggcgggttcaaatggacatggaccgataacccggcctggatttattacgacatcgtgctgaatgagcgattcggcctcggtcagaggattgatgcgacccagattgataaatgggagctgtaccgcatcgcgcagtactgcgatcagccggtaccggatggcaaaggtggcagtggtatggagccgcgctttcgctgcaacgtctacattcaggagcgcaatgacgcctggacggtgctgcgcgacctggctggcatattccgtggcatgacctactggggcgacaacaagctgtatgtgctggccgatatgccccgcgatatctggcacatctataaccatgccagtgtggtcgaaggtaaatttaccttcgccgatccgagcgaaaccacgcgcaacactgccgcgctggtgaactggtccgatccggcgaatcactacaaagacacgcccgaagtcgtttatgacaacgatctggcgatgcgcttcgattacagccagctcgaaatgacggctatcggctgcacccgacagtcagaggcaaaccggcgcgggcgctgggcgctgctcacgaatggcatcggtgaggtggtggcgttcagcacgggtatggatgttccccctgtcggtgaggtgatcggcgtggccgcgaacgaactggctggcagggtgattggcggcagggtaagtgcggtcagcggtcgtaatatcacgctcgatcgggccgcggatgtcaaagccggcaaccggctttttctcaacctgccttcaggtgtggctcaggcacggaccgtgcaggcggttaacggaaatgctgtcacggtcaccaccgcctacagtgaaacgcctgaggcggagtgctgctggggtgtggatactgacgctctgtttatcgcgctctttcgtgttacgggcacccgtgacaacgatgacggcactttcgaggtgaccggcgcgacgtacagcccggatatttacgctgcggttgatactggcgcccggctcgatgagaggccggtcagcgtcatcccgcccggcgtgcaggctccaccggaaaatatcgttatcgacagctactcgacgatcagccagaacattgcgatcaccaccatgcgtgtggcctgggattctgttaaaggggcaatcgcctacgaagccgagtggcgacgcgacagcggcaactgggtgagcgtgccccgcacgtcctctcagggattcgaggtgccgggcatctacgccgggcgttatctggtgcgggtgagggcggtgaacgccagcgatgtctcgtccatatgggcgacatcagctgaggtcacgctcaccgggaaagtgggtaatccgccgaaaccggtaggcttcaccgcctcggaaactgttgtgtttggtatcgagctgaactggggcttcccggcaaacacggacgacacgctgaaaacagagatccagtacagcctgaccggaaccgacgacgatgccatgctgctggctgacgtgccttacccgctccgaaagtatcagcagatgggactcaaggccgggcaggttttctggtaccgcgcgcagctggtggaccggaccggtaacgaatccgggtataccaactgggtacggggccagtccagctccgatgtgaccgatattacagaggccgtgctcgcgcagatcaaggataccgacctgtttaaagacctcatcgagaacgccgtggagagcagccaggcggtcgcggatctggctgaggcagtcaaacagaacgccgacggcctggctgcggcggctggcgcaaaccgccagacggcagaagccatcatcggcaatgccctggcgatcgccgacgtggtggtgcgccagtcagcccagcatggcgctaactcggcgcggttcgaacagttgcgcgaggttattgccaccgaaaccgaggcgcgcgttacggatgtgatccgcctggaggcaaagacggatcagaacgccgcaggcatcacagaagtgcgccaggcgctgtcaaacgagagcgaggcccgcgcttcagctgtagacgagctgaccgcgaagacggagaaaaacgcggcaaatgtcaccgtgctgaaccagaccgtgacggatctggactcctcgaccgcctcgcgctttgaggaaatttcggcagagatcgcgggcattgatggcagtgaaatcagagggggaatacagagcaattccatcgcgcttatcaccaacacgctggcgcaggtcaatacccgaaccctgctaagcgtgcagtacggcgacaataaggcaggtattcagcgcgttgacaacgtgatggcggacgccagccaggccgtcgcggagtcgctcaggacgctggatgccagcgcaggcggcacggcaaatgccactgactttgccaaaacaatggcaaacttctcacaggtttccgccactaaaattaactccctttcagtgacggtaaacggtcagcaggcggcaatcgtccagaattcgcaggcagttgcagatatcagcggtaatctttctgcgatgtacagcatcaaggtgggcgtcgatgccgctggccgccagtacgccgcaggcatgggtatcggtgtgcagaacaccccggcgggcatgcagtcgcaggtcattttcttggcggaccgtttcgccgtgatgtcacaggccggcgggacggtgagtctgccgttcctggtgcagaacgggcagaccttcatcaacgaagcctttatcaattacgcgtcaatcacgctcggcaaagtgggatcgtggtattccgccaattatgtggccgggcagaccgggaccatcatgaaagcggacgggacgtttgaggtcaacggcgcggtatcgggccagggaaggatgcagataacgaacaaccgcatcatctcttttgacgcacaaaaccggccggcagctgttatggggcaacgcttataa

SEQ ID NO: 735 - DNA, 759 bp, Kosakonia cowanii
  source 1..759: mol_type = genomic DNA
atgagcatttcatctgatgtacagaaactggagccgggcagccgcgtccgccttattgaggttgatggcgaagcattcggcgccggcattctgcggtttcataatgaaaccatccctcacacagaggccgagatcattgctgcgggcggcgatgcgtcaaagcttccgccgaagtctgtctggtggcaggggctggagtacggtgcgtggccctttgaactgaccggcctgtccgtcagcagcgacgggcagagcgcccgaccaacactgaccgtggcaaatatcagcggcacgattggcgcgctctgtcgccgctttcaggggatggctaaggcgaaagtgattatccacgagaccttcgctcattaccttgattcccgcaacttctccggcggcaatcctgccgctaacccgaatgaggagcgcaaacaggtctattacatcgaccgtaaatccagttcggatgatgaaaccgtggagttcgagttgtccagcccggcagatctgcggggacagctcatccccacgaggcagatccagcctatgtgtacctggtgcatgcgcggctggtacaaaaccgggaatggctgcacctacgccgggcagaatggcttcttcgacaaggacggtaacccggtcgacgatccgtcacaggacgtatgctccggtctgctttccaccgggtgtaaaccgcggttcggcgctgacaacgaactcgactacggcggctttccgggcgcgtcacttctgagagggtaa

SEQ ID NO: 736 - DNA, 600 bp, Kosakonia cowanii
  source 1..600: mol_type = genomic DNA
atggaaaaacggactgttatcaaactgagcggatcgatggcgcagcgcttcgggcgcacgcaccgccgggtactgtcctctgccagcgaggttttcagggcgctgtccagcacggtagacggatttgaagattatctccgcgaggcgcgcgccagggggctcgatttcgtcatcttccgtgatcgccgcaatatcagccaggaagagttttcgcttctcggccccggcgatgagctgcgcattatcccggtgatacgcggcagcaagcgtgccggcatcttccaggcggtgctcggggtagccctgattgccgggggtatcgcccttggccccgccgggtcagggcttattggtaaaggggttgcgctgaatgttgcgctggtcggcgcatcgatggcgctggggggcgtggttcagctgctgtcgccacaggtggcggggatgaggatgcgtcaggatccggacaacaagccaagctatgcgttcggcggcccggtcaacaccaccgccagcggcaacccggtacctcttctctacggccagcgggaggtcgggggcgctatcatttcagccggcatttacgcagaagatcagcaataa

SEQ ID NO: 737 - DNA, 759 bp, Kosakonia cowanii
  source 1..759: mol_type = genomic DNA
atgaacctcgaatcattaccgaaattttattccccgaaatcaccgaagcttaacgatcagacgccagcgactggcggtgtcgcgctgactatcaccgatgtaatggcagcccagggcatggtgcagtcgaaagccagtctgggttttaatctcttcctggcgaaaatggggattcaggatccggcacctgctattgatgggctgatgcaatatgctcaggcgctgaaaaacccggtgctggggaagctgagtgaaaaggctcgcggagaagttctgccggtgctggtgcagtttgcctatgcagattattcgcgttcggcagccagtagatcgacctgcccatgttgcgaagggaaaggcatggtgcgggaaatgcaggacgtggttaagcaccctggcgttaatggtgtagaggcaacggttaagcacgaagccgtagaagtgatgtgccagcactgcgcgggaaaaggagaggtgggcacggcctgccgcggctgtaaaggtaagggaaccgtgctggatgaaaagagaaccaaactccacggcacaccagtcaggaaagtttgcggtcgttgcaatggaaaccgctttagccgtttgcctacaacccttgcgcgggcgcgaatagagaagattatccctgatctgaccagctaccagtggtacagcggttatggcgatgtaatagcgctactggtgacaaaatgctggcaggaagaggctttcgccgaggcgcaactgcgaaaagtaacaagatag

SEQ ID NO: 738 - DNA, 255 bp, Kosakonia cowanii
  source 1..255: mol_type = genomic DNA
atgaaaatgattaacgctgcggcggttatgctggtttcgttaatggcatcaggctgcgccagcaacacgccgccgctgtgctataacggggcggtggtgatgaaaagccgggtggcggtaccggtattcggcataagaaaaccggtcagcaccaccgaatatctctccggcggcagcttcggttatcagtgggttgagcggagtgctttcacggataccgcgtcctgcgacaggctgccgctgacggaggaataa

SEQ ID NO: 739 - DNA, 954 bp, Kosakonia cowanii
  source 1..954: mol_type = genomic DNA
atgcagatgtttattgcaggcaccagatttgaggccatcaatgtcatggcggccagctatgttctggatgtcatcaccatcaccggcaccgggagtaaaacctactccctgcccggggtggaactgacgtatgccattgtgaatgactttatgggagggcagttaaccggtgcgacctacagcgtcagtgtcagcggattaacgatttcgtggaacgtcaataacgccgttaccctgatcgtatacggcagtccggtggcgggcacactaagtgactattttggttatcagctttttcagtatttaaacggggtgaggacggtcaaactggccccaaattatgtcccgttgtgcctgcgggaaatcatcgatgtgcctgccggcgcgcgcactgtgcagacgcaggttcctgcgggcaatccggtgatgtgctttcaccggcacaccggggcggagatggatatctgctggtggaagcccgccacggccaacgggtatcacgcgctgcagtttcccactgacggcagcaaccagaccgggtgccgggtgtatgtgttttcgaatattctcgcgaacattccggattacggtttctatctttaccgcgacgggcaaatggtctggcacagcaactgccttccccttcaggttattccgctgacgaacggggatatcatcagtgatacgccgctggcggtgtcgtccagtgtcacggcgcatatctttgtgccgcaggaccctgcttatccgacggggtacagcaactttatgtgtgcatcagcgggaaatgacgggacccggtataaggtgcaggtgggaaaagtattccagagcacctttatcagcagtcccgacgagggcaggcgaatgagagggtgggcatgtggcggggtggggtatatcgaaacgcagttctatgaccagtactacagatatgcccttggcctggtctga

SEQ ID NO: 740 - DNA, 168 bp, Kosakonia cowanii
  source 1..168: mol_type = genomic DNA
atgagtgaatcacttaacaacaaagagctggccgcggtcggccatgagtttgctaaggcgctgagcagcgacacgccaaacatcgacatcgcgaagattgtgtcgcgcctggccgagagggtggtctgcactaactcaatagtgacgaatatgtttagctcaatgtga

SEQ ID NO: 741 - DNA, 1416 bp, Kosakonia cowanii
  source 1..1416: mol_type = genomic DNA
atgatttacacaactggctcaattgctgtcagcggcaacacgctgaccggcaccggcacgaatttcaccgcagcaggctctcttatccgtaccggctgcacggtgctggcactgaccagcccggcgcaggccttccagatcaccgcaatcaacggcgcgaccagcctcacggtgaccccggcggccagcccggcggttcccgccggcacgaagttcgccattctgctgagcgacagcctcagcgttgacggcctggcgcaggatatcgccgagactctcaccatgtaccagcgttatatggggggctttgctgacgtgatgaacggggccggcgatgtgaccatcaccatcaatggcacgcctgtgaccgtgcccggccagaaagcgctggcgaagaagggggctaacagcgacatcacctcgctcagcgggatgactacagcgctgagtattgagcagggcggtaccggagcaaagaataaagctgatgcgcgcctggccttatctgctgcatcctctggtgctaactcagacatcaccagtctgtcaggactgagcacggctctcagtatcgcgcagggcggtacaggcgcaaccagtgtttccggcgcgcgcgctgcccttggtatcggtgcggcagcgtctctcggtgatgcgctggcagcaggcgcggtgctcaagagagagccgggtaacgcaaacacgacactgaacaatccgacagctatcttcaactggctcaagtctgtcgggttcgggagttatcagttcacggccgctcaggcaggggcgattatccggtactaccccactttatattttaatgcgggtaacctgcacgctcttctgcagtcgaattattcgacgggcgagctcatctcctggggcgctgttgataacggcggttcatggtcttttgcgcaaaatattttatacggaacggcaaacacgaccaaaggcagtgatggcaccattaaagccgcatcgccggtggcgcgcatcgtacagagtcaggaagcatgtcagcgcgctgacgtcgatgacgatggctttatgtggtgtgggtgcggaacagcaaaccgtgaagcggaggggatcacaatctcccggctcgacaccggagtgtatacgcttacgggctcggcagggcttgcctcatccggctggcaactgctcccgccccgcgacccgcagggatcgggtgatatgggtatcgttgaggcggagcagaccgaaagcggcggcctgacgattcggctttacaggcggcggtatcttcttaccgaggacggtgagatcgaagtgcaaaaaggtaccgcgattgacgttcccccgaccagctggatcgatgtccgtctcgatatgccagaaaccagtatctggaatcagcgcaatgcaggttcgcaggagcaataa

SEQ ID NO: 742 - DNA, 732 bp, Kosakonia cowanii
  source 1..732: mol_type = genomic DNA
atgaacaaaaccataatgtcggcaatccgggcgcatgcgctagaggaatccccgcgcgagtgctgcggcttagttatccagtctggccgtcgccagcgctatatccccgtatcgaacacccacgaaaacccgaccgagcatttccgtatcgatggcgagttctgggcgaatgctgaggacatcggtacaattatacgcgttatacattcccaccccggcgacggtgcacggcctataccgtcagacctggatcgccagcagtgcaacaactccggcgtggtctggggcatttacgcgccggacagcgatgaatacgccgagatcatgcccgaggcggtgccgcttatcggccgcccgtttatcctgggttcacacgactgttgggggcttatcatggattggcacgccacccagggcgtcacgttagacgatttccgcgtcgattatccgtggtgggaaagtcagtacccggacaacttctatttcgataactgggagcaagaaggcttcatcgaatgtgaccctgctcccgggtgcatggtcatcatgcaggttgaatccgataagtggaaccatgcgggcattatcactgaagagggtgaactgctacatcatctgtatggccagccctcctgcattaccccctatgcccgcggctatttcaaggacaggacgatgatctgcattcgccacaggagcctgccagaggagataaagccatggcgcgtttaa

SEQ ID NO: 743 - DNA, 351 bp, Kosakonia cowanii
  source 1..351: mol_type = genomic DNA
atggctgttgaaacctataaatggcccgcgcaacttggagcgggcgcaattgaatataaccagacaatccgggcctcacagttcggtgacggttatgagcaggtggctgaaaatggcatcaactctactgccattcaggttccgatgatttatgttggcaaagaggcgttgataaacgaaattcgctcattcctgctggctcataccgttaaggctttcatcatcacgccacccggcgaggagaaggggttgtatcgggtagtcaaagattctgtgcgtaagaaccagatcagcagcaacgcagcagagcttactttcaccataaagcgcgcctacggcgtctatgcctga

SEQ ID NO: 744 - DNA, 3717 bp, Kosakonia cowanii
  source 1..3717: mol_type = genomic DNA
atgtctgatattgcaacaatttcgctccgggtgaataccgccgagctggagcgcgggaacaaggcgctggatgatttccagcagacggccggcagcgcggcaaacaaggccgatgatctgaacagcgttttccgggcgggtgccgacagtcagaaaaaaaacactcagagcctgaaagagcaaaaagaagagttgcaggctcttctgaacaaaatcagccctgttaaccgggctatggatgagctggaaacgctgcaaagcaaactggctggctttcgcggtaagggactgctcgggaatgaggattacagccggtttagcgcagtgctggataccacccgcgataaattatttcaggtcatggaagcagagaccgccgaagggcaggagcgactgaagctggctcaggacacgcaacgtgccgccgcagcgcaggactcgttcctgaaatctctgagcgagcaggctgctaccttccgggcatcaaagtcagatgtgcttgagtatcgggcctccatactgggtttaacgcaagaagccgccccactgattcagcaaatcagggaaagagaactggctatcgccagtgaggctgtgcagacccggattgccgcacaagagcttcgtgagaaacaggccgcagagcgccaggcgttagctgaagcatctcgcctgcagtcacaaaatgataacttcgtcgagtctcttcgtaatcaggctctggctatcggtaaatcacgtgctgaggtgcttgagcttaaagcggctcagatgggactgctgcaggaggccggaccgtacatcgctgcgcttaaggcgcaggaggccgcaaccgcacaggaagcagcaaataaaaaagtttctgccatgcaatcccgcatgctcagggatgcgattgcagagctggaggctgcagagcgcgccgaggcatccgagatgcaacgtgcgcagaatatccgcgactcatttgtccggaccctcgaacagcaggcagcatcgatcgggaaaacacgggtcgaattgctggaaatgaaggctgcccaactcggtgtttcacagcaggcagctccttttatcgaaaagcttcgtgagcaggatgaagcatggaagaagggcggcattagtgccgggcagtaccggcaggcattaaggatgctgccggcgcagtttacggatatcgccacgtccattgctggtggcatgccattgtggatggtgctgatccagcagggcgggcaaatcagtgattcttttggaggtctgggcgggctttttcaatttatcaaggaagaggttcttgggtttaaagaggcaacagacgactcttcagaatcactttcagaaaatgcgaactcactggctgagaatgccgaacatggcaggggtatgctttctttcctgactcctgccaggcttgctgttggtgggcttgtgggggtggcttcacttctggcaattgcatggtacaaaggcgcccaggaagccagtgagttcaacaagcagcttatcttaaccggaaactatgctggtaaaacggcggggcaacttagtcaactttccaggcaaatagctgatgatgctggtgtgacaataggagaatcatcggcaactctggcgaaaattgttgggtcgggaagatttgatggaaataaacttgaggttgttgccagagcagctgcggccatggaagatgcggttgggcagtcagtagatactacgatagctaatttccagaaactttacgactcaccagtaaaggcgtccattgagctaaacactcagttgcattacttaactgcggcggagtttcagtacatttcggctcttgagcgccgcggtgataaggaagaagcagggcaaaaagctgctgatagttatagtcgggcagaacagcaacgcagccagcaggttattgacaaccttggccttattgatcaggtgattcgtggcgtatctgatacatggaaagcatattgggatgcagccttaggtattggtagaaaagaatcgacagctgaacagcttgaggttgtgaggcaaagaattaaagaaatcaccaatcaatcccgtccaggtgtttttggtatgggtaatgtcggtgatggtggtgctgcaaaaagggagttggcggcattgcttcagcaagagagagagcttgggtttgttattaaatctcaggaaggttttaaccagaaaagggctgagtttaataagataaatcaagatggtattgatgcgcagatatcgtttaataaatatttggatgctggaaccactcaggcagaaaaaagagcgctggcacaaaaggatttgaacaaagctattgccgataacgcgaaagcagttaaagcgacgcagggcttaccgtatgagcagagagtcaagccattgactcctgaacaaatatctaaggcccgagctggcatcgagaagctgtataaagatccaaagatccctaaagccaagggcataacggtggcagcaggggatcgtgctgaggattctgcgcaggcggaactgctggcccttcaggcacagttgaaaacacttcaggatcatcgttctgttaatgacaaaatcagtcagcagcgcaacgacctttatgccactgagtctaaatttgccgtcctggaagcggccgcgagcatccggcagttatcaaagcaggagaagtctctgctggcgagcaaaaatcaggtgctgcaacttgcgcagcagaaagctcttcttggtgaccagatcaccactcaggagcaactgaataagcggatggatacggcgcagaaatacgttactcagattgtggagaagcaagccggacttgcttctggagccacgatgagtgacagactcgccgggcgacaggcaaatctgtctcagctgcgaagtggctggctcaatgcgggcggtggtctcaacgatgacggttataagcgggagttaaaggccgctaacgattactacgcagcagaagacaaactacgtggcgactggatggcaggtgccagaaaaggctgggccgagtaccttgatgcggcaaccaacgtttatggctcaatgcaaagcgtagcgcagtcagccctgggcggtatatcagatatgctgacaaacctggtcactaccggaacggccagtttcaaaagtttcgccgcctccatgatgaagatgatcgctgatgtgattaatcgactgctcgtggcgtacaccgtgcaggccgcaatgggatggatttctgcgggtacctcatcagcaggtagtggtgcaggccagtcttttgctgtcccgtctttccggccagcgtggaatgggggatatatccctgagttcgactccggcggttacacaggcgatggcggcaaatatcagcccaaaggggtggtacacggcggtgagtttgtcttcaccaaagaggccacagctgcaatcggtgtcaataatctttatgcgatgatgcgtggtgctcagggatatgctgaaggtggggttgtcggcaggccgcccatgctggggcttatgtccggttctggtaatgctgcaccggtaattaacaccactgtaaacgtcgatgccagtggtaacccttctgctcaatccagcagctctggagacgctatgggacgcgccatggcggctgaaatacaaaacgctgcaaccctggtagttcagaagcacctgaagccagggggcatgatctacaactttacgaagggacgttag

SEQ ID NO: 745 - DNA, 3825 bp, Kosakonia cowanii
  source 1..3825: mol_type = genomic DNA
atggaaacgatcactggtgcaaagggtggcagccagaagcagcactcgcctgtagaacagccagatagtgcccagtcgatggcgcgctgccgcatcttgctggcgcttggtgaaggggaattcgccggcggcctggatgcaactcgtatttttctggacgggacgccgctgggcaatgccgaagggacgatgaattttgaaaacgtcacatgggatttccgaccgggcacccagacacagacccccatcccaggctttgccgcggtcgagaatgaaaccagtattggcgtatcgctgacgaaagttgccccctggacccgcgcgctgagtaatacccagattgatgcggtgctcgtgcgtattggcattcccggcctgcagcaacagcagaataatggcgatatcgttggtacgactgtcaaatatcacatcgacctggccgtagacggcggcgcgttctcgacggttatgaccaggaccgtcaccgagaagctcagctcgctttatgagcttacccaccgcatcaaccttcccaaagccactaccggctggcagattcgcgtggtacgcgatacggacgacagcaccagccagctgctgcagaacaaaacgcaggtgcaggccatcacagaggttatcgacgctcgtcttcgttatccgcacacagcactgttgtatgtgtcgttcaatgcaaaatcattcagcgatataccgaaaatctcctgtaaaccgaaggggcgcatcatccgaatcccctcaaactacgatccgattgcccgtacttacagcggcacctgggacggcacgttcaagtggggatggtcgaacaacccggcatggatctggttcgacgttctgaccgaaccacgtttcggccttggccgccgcatcacggcggatatgctggataagtgggagctataccgtatagcccaacgttgcgatcagaaggtgcccgacggaaagggcggcagcggcaccgagccgcgctttatgtttgacgtctatatacagtcgcaggccgacgcatggcaggtgatcaaagatatcgccgccgggttcaacgggatgacgttctggggcaacaacatgttcaacgttgtctctgacatgccggcggatacgtcgaagctgcagatcctcaaccgcgccgcagtgatcggcaagccggtctactcaagcggcagtgaaaagacccgtttttccagtgcgctgattaatttcagcgatccggataatcactatcaggatcgaactacggcggtgatgttcccggacctggtgaaacagttcaagtttaagcagacgcaaatcacagcgatcggctgtacgcgagagagtgaggctcagcggcgtggtggttgggcggtgtattccaactctcttgaccgcattatcaccctacaaactgggcttgatggctatgtctatgtgccgggcacggtgtttgcctttgccgatgaacgcctttctggtcgcgtgtacggtggtcgagttgccgcgtacaacggcgggctgaaggctgtgacaactgatcggggcaccagcgcggttgctggcgacacgctgatgattcgcacgcagggtggaaccgtcgaaagtcgggttatccaggctgtaaatggtacgcagcttgtggtgtccacgcccttcaaagcggaccctttgccgaatgcagtgtttgttatagacgccgggcagttgagattacagtactttagagtaactaatctgacgttcaatgatgaggaaaatacgtactcaattaccggggcagaatataactcctctaaatatgacgcggttgataataatgcccgactggatacgccgccgatcagcctgattccgaccgggcttgttaatcagccgactaatatccaggtatcaagctttgaatccgtaagacaggggcagcgaattactacattgatcggatcctgggatgcgccactggataaaaatggcaagcctcaggctgatgttatctcataccaggtgcagtggaagcgtggagataatgaatggattaatgtgcctgaaacaggactgcgcaatatagaagtgcccggcatttttgagggtgactatcttgtacgcgtgcgtgccatcaactcaggaggggcttcaagtctgtgggcctcttcacagctgacacaccttaaggggcgcgtgggcgctgttccaaagccggtagggctgtcagcgtcagaggatgtcgtattcggtatcaatgtcacctggggttttccggaagatactggcgatacgctgagcacggaactgcagtacagcctcgcaggcgacggctcaaacccgatgctgctggcggctgtaccttacccgcagaaactctaccagcagatgggcctcaaggctgggcaggagttttggtaccgggccaggcttgttgaccgtaccggcaatcagtcagcctacactgcctggatccacggccagtccagctccgatgtgacggacattactgaggcggtgctcgcgcagatcaaggacaccgaactgttcaaagacctcatcgagaacgccgtggacagcagtgccaaagttgcggaactggcagaggcagtgaggcagaatgccgacggacttgctgaggcggcaggcgcaaaccgccagacagcagaagcgattatcggtaatgccctggcgatcgcggatgtagttgtccggcagtcagcccagcagggcgctaactcggcgcggttcgaacacctgcgcgaggttatcgccaccgaaaccgaagcgcgcgttacggatgtgatccgcctggaggcaaagacagatcagaacacctccggtattaccgaaatgcgccaggcactggcaaacgaaaccgaggcacgcgcgacagctgtcgatcagcttaccgcgcagacggaggagaacaaggccagtgtcacggagctgacgcagaccgtgacggatctggactcatcgactgcctcgcgctttgaggagatatcggcagaaatagcgggcattgatggcagtgacatcagagggggtatacagagtaactcaatcgcgctgatcaccaacacgctggcgcaggtcagtcagtccacccgaatgagcgtgcagtacggcgctaacgccgcaggtatccagcgtgttgacaacgtgatggcggacgccagccaggctgttgccgagtcgctcaggacgctggatgccagcgcgggcggcggcacggcaaatgtcactgattttgccaaaaccatggctgatttttcgcaggtctccgcgacccgcatcaatacgctgtcggtcacggtaaacggtcagcaggcagcgattgtccagaatgctcaggtttctgccgacatcaacaataacctttctgcgatgtacaccatcaaggtaggtgtggatgccaatggccgccagtacgccgcgggcatgggtatcggtgtgcagaataccccggcgggcatgcagtcgcaggtgctctttctggccgatcggttcgccgtgatgtcgcaggcaggcggaacggtgagcctgccgttcgttatccagaacgggcagacattcatcaacgatggcttcttcagggatgccagcattcagttcggtaaaatcaccgattcactgaagtcggacaactatgccgccggcgcggcgggatggaatctgcctaaaagtggaaatgccgagttcaaccaggtaaccgttcgcggcgcaatttacgccactaacggtaatttcaacctcacggggccgggaaatgcgaccgttattaacgggcttggcgtcacggttaaccttgcaaacggcggtcttataaggctggggagctggtaa

SEQ ID NO: 746 - DNA, 774 bp, Kosakonia cowanii
  source 1..774: mol_type = genomic DNA
atgacagcacttattgatacggcagccatgcttgcacctggcggaaaagtccggctggtagaagtggacgcctcagaattcagtggtggtattcaccgctttcattacagtccttttccgcatactccacgggagattgacgaggcgcagggtgacgaaagcaagctcgggcctaagcctgtagtcttcgatggtgaggtctatgatttctggcctttccagttaacaggcctggctctctcaactgaccaggcggcagagccgtcactcagcgtctcaaaccttgacggccatatctccgcgctatgccttcagtttaaggacatggtgaacgcgaaggtgagcattatcgacacctatacggtgtatctggatgcggtgaattttcccgaccacgttaatcccactgccgatccgactatgttcacgcttcagaccttctggctggataccaaaacgtccgaagatgacgaggtggtgacctgggcgctaagcagcccggcagacctgcaggggctggtaattcccaccagacaaattacttccctctgtgaatgggcactacgcggacaataccggagcggtgacggttgcacctataacggtacggcttacttcgatgcaaagggaaaccccgtagcggatccggcccttgatgtctgcggcggttgcctgagtgactgtcggaaacgattcggtgccgggcttgcagagccaaacgcggcgatcctcgattttggcggcttcccggcgacggttcttttcacccgttaa

SEQ ID NO: 747 - DNA, 600 bp, Kosakonia cowanii
  source 1..600: mol_type = genomic DNA
atggcgcgtttaaccactattcgcctgtatggcgctctgggcgcccggttcgggcgagtgcataagctggcggtgcagacatccgccgaagcggtaaaggccctgtgcatcaacttcgacgggctggaagactacctgatgaacgccaaaaagaacggtatgaccttcgccgtgtttcgtggaaagcgcaacataggcgtgcaggatttccaggggctggctggtaaaagtgatattcgtattgcgccggttatggagggggcgaagaaggcgggtatgttccagaccatcctgggggcagtgatggtggtcgcaggtattatcgtgggcgtggcgaccggctggaccggtgtaggtctcacctttggtgccgggcttatcatgtcaggcgcatcaatgatggccggcggcatttaccagatgctctctccacagcctaaagggctacagggacgcgacgaccctgacaacaagccaagctacgccttcggcggttcggttaacactctggcgatgggtaatccggtggcgccactttggggcgagcgggaaatcggcggtgcgatcatcagcgccggcatagtcgcggaagacatttga

SEQ ID NO: 748 - DNA, 804 bp, Kosakonia cowanii
  source 1..804: mol_type = genomic DNA
atgaaacttgaatcttcactaaaacacttcagccctcaggggatgaatatcagcgacagcgttaaaggcacctctcctgacaggctgaccggtacagatgtaatggcagcgattggcaccaccagcagccgcgcgcgcttcggtcttgctgcgttctttggaaaggccgggatcagcaaaacggatgagcaaatcgcagtgcaggcgctggtgcggcacgcgatggaagttgccccgaagaacgtgcgtaaagcagctggtagcgagtttggttggtgcatgcatgtgctggcgcagtttgcctttgctgaatatgcccgttcggcagccagcagcagcacctgcacctcctgcagcggtgggggctttatctccagtcgtgaagatgtgatcaaacatccgggcattttcgatgctgacggtgtcgagctggtcgccccaaagattaagcatgagctggtaaaacatgcatgcacagcctgtggaggtaagggcatcattcctgcgcgctgccgctgtggcggtaaaggggaagtccttgatcgcgtggcaacgaaagagcggggcgcgccggtattcaaaacctgtgagcgctgctccggtaatggattctcctcactaccatcaacggctgcacacaaggctattatccggcgcttgccagatctgcatatcaggacatggactcgcaactggaagccatttcttgagtcgctggcggagatttgtcagcaggaagaggccaaagctgaaaaagaatttcagtgtgcaaccagctttcacgacgaagagaacaaaatttag

SEQ ID NO: 749 - DNA, 1083 bp, Kosakonia cowanii
  source 1..1083: mol_type = genomic DNA
atgcagaggccagcccgttacgacgctaacctgccccgtaacctgacctttcgcaagagagataagctttattcctggcgcaacccaataaccggccaggtaatctatctgggccgcattgatcgcagggaagcgatagcccaggccattgaagccaacagctatcttgatcagaactatatcccctccagtctacttcagcgcattaaagaaacgcccaccctgactatggctaaatggctggagaggtatgacgttattctcgagcgaagggaattaaaaccaaacacaatgaaagttcgcaggaaccagatggagacgatcagaaaagagttcggcaccatcgcccttagcgcagttacaacaaaagacattgcggaatttttggaaacatacattgcctgcgataaaaaaagcatggctgcaggtctgagatctgtactactcgatgtattcagagaggcgctcgtggagggccatatagaaaggaacccggcagaacctacacgcaccccggcaccaaaagttaagcgggaacgtctactgctcgaagcgtattttacgatacgagaaacagcagctgctaattcagtatgggcggcaaatgcatttgatcttgcgctggtcacggctcagcgacgcgaggatatagccatgatgaaattcactgacatccgggaagacagaatgtttgtcatacaggagaaaacagggaataaattagccatccctttagacctgaaactggaagcggccgatcttcatttaaaagaagtgatagaacgttgcagggtgaacaatccatctgagttcctgctttactcgccggtgcgtcggggtggaagaaagcccggaccactgacgccggatgggttaacccaggcattctctgatacccgtgatgtcactgtgcttaaatttggccctcacccgccgtcatttcacgaaattagaagtctggccagtaggctttatgagaaggaaaaaggcgaagaatttgcgcagcggcttttgggccataaaaatttatcaatgaccaaaaaatacttggactcccgtggggctgagtatgttagggtttag

SEQ ID NO: 750 - DNA, 615 bp, Kosakonia cowanii
  source 1..615: mol_type = genomic DNA
atgactaaacagataaacgatacccccacgcgggggccttccgaccatagtgtccgtgatcaggttgttgacgcagccactgagcatttcggccactacggctacgaaaaaaccacggtctccgatctcgccaaagcgatcggtttttcaaaggcttatatctataagttttttgattctaaacaggcaatcggcgaagttatctgctcaaaccggctggcgatgatcatggaaattgttaatgctgcgattgcggatgcgccgacagctgctgagaaaattcggcgattattcagagcattatcagaatccggcagcgatttgttttttcgtgaccgtaagttgtacgacatcgcggccgttgcggcacgtgataactggccttcagcgcaagcgcatgagcaacgtctgcgtcagcttattgaacagatcattgttgaagggcgtgaggctggtgagtttgaaagaaaaactccccttgacgagactgctgatgcgatttttatggtcatgcgaccttatatcagcccggtgcagctgcaatataatctggaaactgccccggccgcagccgcattactgccctccctgatcctgagaagtttgtccccttga

SEQ ID NO: 751 - DNA, 615 bp, Kosakonia cowanii
  source 1..615: mol_type = genomic DNA
atgccaaaagagatgaacatcaatgcagtacgcggcccgtcggatcactcggttcgcgatcaggttgttgaggcagccaccgagcacttcggccactttggttacgaaaaaaccaccgtttccgatctcgcgaaagcgattggtttttccaaagcctatatctataaatttttcgattccaagcaggcgataggcgaagtgatatgcgcgaaccgcctggcgatgatgatggatatcgtcaacgccgctattgcggatgcgccgagcgcgtcggaacaacttcgccggctgttcaacgccgtggtgcaagcaggcagcgatctcttctttcacgatcgcaaactgtatgacattgctgccgttgccgcgcgtgacaaatggccctccgcgcaggcgcacgagcagcgtctgcgccagctcattgagcagatcgtcaaagcgggacgcgaggcaggagagtttgagcgtaaaacacctcttgatgaagccgcggatgccatctacctggtgatgcgtccctatatcagccccgttcagttgcagtacaacctggagacggcaccggctgccgctgttttcctctcttcgctgatcctgagaagccttgcgccttga

SEQ ID NO: 752 - DNA, 1110 bp, Kosakonia cowanii
  source 1..1110: mol_type = genomic DNA
atgttcaggcttaaacctgccacttttgctgtttacctgctgccgtttgcacttgtggcctgcggcgacgcttcagataacagtgatccccgcagcctgccacccctggtcaggtctgccgcagcgatcaacgcaaaccattcttcccgcgcttttacaggggtggtggttgcacgtatccagagcgaccttggtttcagggtacaaggcaaaatcctggaacgtctcgttgataccggtcaggccgtgaaacgaggccagccgttaatgcgtctggaccctgtggatctgagcctgcaggctcaggctcagcaacaggctgtcgctgcagcaaaagcacgcgcccgacagacagcagacgacgaatcgcgatatcgcggtctggtcactaccggagctgtatcggcctccgcttacgatcagattaaagccgcggcagatacggccagggctgatctcagtgccgcccaggcgcaggcgaatgtggcgcaaaacgccatgagctacgcagtcctggtggccgatgatgacggggtggtcatggatacgctggccgaacctggtcaggtggtcagtgccggacaaccggttatcagacttgccagagccggtcagcgcgaagcggttgtccagttgcctgagacgctacgtccgtccccaggaagcacggcacaggcttctctgtacggcagcgataaacagcccgtttccgcgacactgcggttactctcggatgccgccgatccgttgacgcgcacgttcgaggcacggtatgtgctgaacggcccgttgtctggtgccccactggggtccactgtcaccattcatattgcgcagggcagagcatcgcagccgttgctgcaggtgcctttagccgccgtttttgatgcgggtaaaggcccgggtgtctggagcatttctggaaaccccgccagagtggcatggcgtccagtacaggtcgtcagcctcggggatgatgcggcaagcgtgaccggcagccttaagcctggagaacaggtcgtggcgctgggggctcatctgctgcatgacggtgagacagtccggctggcgaagcagagcgatgtcagtgtcgccgggagccagccatga

SEQ ID NO: 753 - DNA, 1110 bp, Kosakonia cowanii
  source 1..1110: mol_type = genomic DNA
atgctcaggcccaatcctgccaccttagctatttgcctcttgccgctggcgattgtcgcctgcggtgacaatggcaacagcgacgatccccgaacccagccgccgctggtgagaactgcccctgtcatgagtgcggtcgataacgcccgcgcgtttacgggtaccgtcgtggcgagaattcaaagcgaccttggttttcgtgtgccgggcaaagttcttgagcgccttgtcgataccggccagacggtcacgcgcggccagccgttaatgcgtctcgaccccgccgacttaagcctgcaggcggtcagcgctgcccaggcggtaagtgcagctcaggccagggccagacaggcggcgagtgatgaagcgcgctaccgcagcctggttaccacgggcgcggtgtcggcctctgcctacgatcaggtcaaagcggccgcagagacggcgcgggccgatctgaaagcggcgcaggcgcaggccagcgtggcgcaaaatgcgatgcattatgccgtgctgctggcggatggcgatggggtggtgatggcgacgctggcggagccgggccaggtggtcagcgccgggcaggcggtggtcaggctggcccgttccgggcagcgtgaagcgattgtccagctcccggaaaccctacgcccgtcgctcggcagccgggcgcaggccacgctgtatgggcgtgctggtcaggctgtcccggcgacgttgcgactgctgtcggatgcggcggatccgctgacgcgcaccttcgaggcaaggtatgtgctgcagggcgcgctggcaagcgcaccgcttggagccaccgtcacgctcaacattaccgaaggtttgtcagccaagccgttactgcaggtgccgctggctgccgtttatgacgcgggaaaagggccgggtgtctgggaagtgtcaggcaaacccgcccgggtgagctggcagccggtagaggtggtgaatatcaccgatgatgccgcacgggtgatgggaaatttgcaacccggcgagcctgtggtcgcgctgggtgcgcatttgctgcatgagggtgaggcggtgcgacaggcgaagcagagcgacagcgaaatcgcagggagtcgcccatga

SEQ ID NO: 754 - DNA, 3111 bp, Kosakonia cowanii
  source 1..3111: mol_type = genomic DNA
atgagtagtggacgtttcaatctttccgcgctcgctgtgcgtgagcgttcagttacgctgtttcttattctgttaattaccgttgccggcattctctcgttccttggactggggcgcgcagaagacccgccctttacggttaagcagatgaccatcatttccgcctggcccggagccacagctcaggaaatgcaggaccaggtggccgaaccgctggagaagcgtctccaggaactcaagtggtatgaccgcaccgagacctacacgcgccccggcctggcttttacaatgctctcgttgcaggacagtactccaccttcagaggtccaggaagagttctatcaggcacgtaaaaaactcagcgatgaagccaggaacctcccagccggggtaattggtccgatggtcaacgatgagttctcggatgtcacgtttgcgctctttgcgctgaaagcaaaaggagagccacagcggctactggttcgtgatgccgaatcattacgccagcgcttattgcatgtacccggggtgaaaaaggtcaatattatcggcgagcaggctgagcggatttttgtctcattttctcatgaccgtctggcaacactgggtatctcaccgcaggatatctttgcagccctgaacaaccagaacgtgctgacgcctgccggttcaatagacactcgtggtccgcaggtttttatccgtctggatggggcgtttgacaagctggagaaaattcgtgaaacgcctgttgtatcacagggaaggacgctgaagctttctgatgtcgcgacagttgagcgtggctacgaagatccggcgacctttatggtacgtaaccagagtgagcctgcgctgttgctgggtattgtgatgcgtgagggctggaatggtctggatctgggtaaagcgctggataaggaagcggccagcatcaatgcggatatgcctctcggcatgacatttacgaaagtcaccgatcagtccgttaacatcagctccgccgttgatgagttcatgatcaagttttttgtggcgctgctggtcgtgatggtggtctgctttctcagcatgggctggcgcgtgggcgtggttgtcgctgcggctgtgccactgacactggctgtcgtctttgtgatcatggaagcgtcaggtaaaaacttcgaccgtattaccctgggctcgcttatcctcgcgctcggtttactggtggatgatgcgatcattgccattgaaatgatggtggtgaagatggaagagggttatgaccgaataaaagcctctgcttatgcctggagtcacactgctgcacctatgctggccggtacgctggtcacggccgtcggctttatgcctaacggttttgcacaatccacggcgggtgaatataccagcaacatgttctggattgtgggaattgctttaatcgcctcctgggttgtggcagtggtctttacgccgtatctcggggtgaaaatgctgccagatatcaaaacggttgaagggggacatgatgctatctacaacacccgacgctataaccgttttcgtcagttgctgacgcgagtgatcgcacgaaaatggctggttgcgggtgcagtcgtcgcggtattcaccgttgccgttcttggcatggcactggtaaaaaaacagtttttcccgacgtctgatcggccagaagttcttgtggaagtgcagatgccgtacggcacctctattgaacaaaccagcgcggccgtaacgaaaattgaggactggctcaggcgccagaaagaggcaaaaattgtgacggcttatatcgggcagggttcaccacgtttctacctcgccatggcaccggaactgcccgatccctcttttgcgaaaatcgttgtcctgaccgacagccaggaagcccgtgaggcgctcaagtttcgtcttcgccaggctgcggctgacgggctggcaccggaggcgcgggttcgcgtgacccaactggtctttggcccgtattcaccctacccggttgcctttcgtgtgacagggccggatccgacggtattacgggacattgcagataaggtgaaaacgcagatgcaggccagcccgttgatgagaacggtcaacacggactggggctcacgcgtgccgacactgcatttcaccctgaatcaggatcggttgcaggcggtggggctgacctcaaactcggtggcccagcagcttcagttcctgctttcgggcgttccggtcactgctgtacgtgaagatatccgttcagtgcaggtcatgggacgtgctgccggcgatatcaggcttgatccagcgaaaatagctgactttaccctggtcggctccgcagggcagcgtatcccgttatcgcaggctggcgaggtcgaagtgcggatggaagatcctgttctgcgccgtcgtgatcggatgccaaccattaccgtgcggggtgatatagctgaatcccagcagccgccggatgtctccactgcaattatgaagcaactgcagcccatcatcacaacacttccggatggataccgtattgatgaagctggctcgattgaggagtcagggaaagccaccaaagcgatggcacccttattcccaatcatgatagccatgacgctgctgattattatcctccaggtgcgctcaatgtcggcgatggtgatggtctttatgaccgcaccgctggggctggtgggggtggtgccaaccttactgctcttcaatcagccctttggcatcaatgcgctggttggtctgattgctctgtcagggattttgatgcgtaacacgctgatcctgatcggccagattcaccataacgagcaggaaggtcttgcgccctttcatgcggtcattgaggcaacggtacaacgttccagacccgtactgctcacggcgatggcggccattctggcctttatcccgttaacacattcggtgttctgggaaacccttgcctacaccctgatcggcgggacactgggggggaccattattacactggtgttcctgcctgccatgtatgccatctggttccggatcaagagccccgattcaaactcgtcaacggaaaaccgttccgcttctggaggattaaaaaatgtctga

SEQ ID NO: 755 - DNA, 3087 bp, Kosakonia cowanii
  source 1..3087: mol_type = genomic DNA
atgagcggcggcagttttaacctctccgcgattgccgtgcgcgagcgcgctattacgctgtttctgattatcctcattactatcgccgggagtgtctccttcttcaaactggggcgggccgaggatccgccgtttaccgtcaagcagatgaccattatctctgcctggcccggtgcgacagcgcaggagatgcaggatcaggtagcggaaccgctggaaaaacggctgcaggagttgcaatggtatgaccggactgagacctatacgcgtcccggtcttgctttcaccatgctctcccttcaggacagtacgccaccttccctggttcaggaggagttctaccaggcgcgtaaaaaagtgggcgatgaagctaaaaacctgcctgccggggtaatcggcccgctggtcaatgatgagttctcggatgtcacgtttgcgctgtttgcgctgaaggccaaaggcgagccgcagcgcctgctggtgcgggatgccgagtcgctgcgccagcggttgctccacgttcccggcatcaaaaaggtcaatatcatcggcgagcaggcggaacgcatctttatctccttctctcacgaccggctggcgacgctcggcatctccgcgcaggatattttcgccgcgctcaacgaccagaatgtgctgacgccggctggctccatcgatacccgcgggccgcaggtctttattcgcctcgacggcgcgtttgatacgctggagaaaatccggcaaacgccgctggtggcgcagggacgaacgctgaagcttgccgatgtcgccacggttgaacgcggttatgaggatccagcaacctttctggtgcgcaatcagggggaacccgcgctgctgctgggtgtggtcatgcgcgagggctggaacggcctggcgctgggagaggcgcttgataaagaagccgccagcattaatgccgggatgccgcttggaatgtcattgaccaaagtaaccgatcagtcagtgaacatcagttccgccgtggatgagttcatgatcaagttctttgtggcgctgctggtggtgatggtggtctgcttccttagcatgggctggcgcgtaggcgtcgtggtggccgccgcggtgccgctgacgctggccgtcgtctttgtgatcatggaagcgacgggcaagaacttcgatcgcattacgcttggctcgctgattctggccctcggtttgctggtagatgacgccattatcgccatcgagatgatggtggtgaaaatggaggagggctacgaccgcatcaaggcttccgcctatgcctggagccataccgccgcgcccatgctggcgggcacgctggtaacggctatcggctttatgcccaacggttttgcccactccaccgccggggaatataccagcaatatgttctggatcgtcggcattgcattgattgcctcgtgggtggtggcggtggtctttacgccctacctgggcgtcaaaatgttgcccgcgataaaaccgattgaaggggggcatgcggcgatctacaacacccgtcgctataaccagttccgtgggctgctggcacgtgtgattgctgcgaaatggctggtggcaggctcggtggttgtactgtttaccgttgccattctggggatggggctggtgaagaaacagtttttccccacctccgatcgcccggaagtgctggtggaagtgcagatgccttacgccacttccattgcgcaaaccagcgccacaacggcgaaaatcgaggcgtggttcaggcagcagaaagaggcggaaattgtcacttcctatattggccagggctcaccgcgcttttatctggcgatggcgccggagctgcccgatccttcgtttgccaaaattgtggttcgcaccggcagccaacaggcgcgcgaagcgcttaagtttcggcttcgtcacgccgtggcggatggtctggcgccggaggcgcgcgttcgagtcacccaactggtgtttggaccctattcaccctatccggtggcctttcgcgtgatgggaccggatccccaggtattacgtgacattgccgataaagtgaaaacggtgatgcaggccagcccgatgatgagaacggttaatacggactggggcgcacgggtgccgacgctacacttcacgcttgatcaggatcgcctgcaagcggtggggctgacctccagcgccgcggcccgccagcttcagtttctgcttaccggcgtgccgattacttcggtgcgggagaatatccgtgccgtggaggtcattggccgtgcggccggggatattcggcttgatccgggtaagatcgccggtttcacgctggtcggctcggccggtcagcgcattccgctgtcgcaggtcggggaggctgaggtgcgcatggaagagccgctgctgcgccgccgcgatcgggttccgaccattaccgtgcggggtgatattgctgaatccctgcagccgccggatgtctccaccgccatgatgcagcaactgcagccagtgattgccgcgctgccggacgggtatcagattgaacaggcgggctcgattgaggagtccggcaaagccaccaaagcgatggcaccgctctttccgattatgatcgccatgacgctgctgatcatcattttgcaggtacgttcactctctgcgatggtgatggtgtttatgaccgcgccgctggggctggtcggcgtggtaccgacgctgctgctcttccatcaaccctttggtatcaatgcgctggtggggctgattgccttgtccgggattttaatgcgtaacacgctgattctgattgggcaaattcaccacaacgagcgggaggggctggcaccgtttgacgcggtgattgaagcgacggtacagcgtgcaaggccggtgctgctcacggcgctggcggcgatccttgcctttatcccgctgacgcattcggtcttctggggaactctggcctacacgctgatcggtggaacactcgggggtaccattatcacgctggtgttcctgccagcgatgtatgccatctggtatcgcattaaccgccccgatccgcatgaagcgaagagagcagtgggttaa

SEQ ID NO: 756 - DNA, 1008 bp, Kosakonia cowanii
  source 1..1008: mol_type = genomic DNA
atggcaaaaccggactggggcgcacttcagcaacggttcctgtccgatcatgccgcaactggcatatcaccgaaggattggtgtgaagcgcagggactgaactacgctacagcacgtcgacacatcaaaaaaccaactgcgcaaattgcgcaaaaaactgcgcagaaacaagtgcgcaatgcgcagaaggaaaaagacgttaatgcattggtggaaaacgacggattaacagcgcagcagcgaatctttgtggcggaatacctgaaagaccgcaacgccacccaggccgccatacgtgccgggtacagtgcaaagactgctgagcaaattggttatcagctccttcataaaacttcagttgccgctgctattgagaaacagcaaaaggcctccttgatgcgaacgcttgccagtgctgatgaggtgctggcccagatgtggcagctcgctacttttgacgctaacgaactctcgcaataccgccgtggtgcgtgccgctattgtcatggcttcggccataattatcagtggcgcgatatggtggagtttgaagagcatcggcttaaagcgatcgataaaaagggtaaagatccggtagatgtcggcggctatggctatgaccacaaccgggaacctaatccggcatgccctcgctgtaatggtgacggcatcggtcagccgtatttcgctgatacccgcaagctaccgcctgtttcccgcctggcttattccggcatcaagctcggtaaaaacggcgttgagattacagctatcagccgtgagcgtatgtatgaagccgtgatgaagcggcttggcctggcggacagcgagtttgcgcagcagctgcagcagatcgaaatcgaacgccgccagttggaggtggaaaaactccgtaaagagctggcagcagatccggaagatgaggtaccgatgcccgtggcaattaacattaacgtcgcggatgctcgcgtaaggaaagacgatgacggggatatcgccgacccttaa

SEQ ID NO: 757 - DNA, 489 bp, Kosakonia cowanii
  source 1..489: mol_type = genomic DNA
atgacacgaattggcattcttggagtaaatgatctgactgacaccattctggtcgaattgttccgtcttgatccttgcgctcatgtttatctatcatccgtggagcatgagcgcgcaaacctgctggcaaggaagtttccgtgctggattcaggatgacgttcaggcggtaattaacgaagcagatatcattatcattacgacaggaacatcttcccctgaaaacccatcggaaaaaatcgagtaccgaaaatcacaattaatcttttttttggaagcatggacatcaataaacagtcaggtgttttcaccccatacggataaaaaaataaattttacaaccagacatgtagcgctggctaatatttcaccattcattcatctaacagaagtacagattgatgactatctttttattcttaaagtcctgttggttgcaatgaaacccgtgcatacacttgatgtcaatttcagatcgtcttctgaataa

SEQ ID NO: 758 - DNA, 366 bp, Kosakonia cowanii
  source 1..366: mol_type = genomic DNA
atgaacaggaaagcgtttataaatgatttaatatcatggataaataataacattgagtcacatctgaaaattgatgatgctgccataaagtccggccattcgaaatggcgcttacaaaggctgtttttagcggagaccgggcagactcttgatcagttcatcagagagaaaaagttagttctgattgctgataaacttatttcctcaaatgagccactgattaacctggccataaattatgtttttgactctcagcaatcatttaccaaagcgtttcataaaaagtatcaactaccccccccaaaaaaatatagaaagaaatttaaccgtcagcatagtaacgttttttatttcgacggaaagtaa

SEQ ID NO: 759 - DNA, 1077 bp, Kosakonia cowanii
  source 1..1077: mol_type = genomic DNA
atgcagaacacaaacgtagcagtagccgaccagaacgctgtcgttaactcaaacatcgcgctgttcgattcacagtaccttaatgccatcagcactttcgcccagattatggcgcagggtgcggcgacagtaccgaaacaccttcagggcaaccaagccgactgtatggccgttgcaatgcaggcggcgcagtggcaaatgaaccctttcgccgtggcgcagaaaacccatctgattaacggcgtgctgggatatgaggcccagttggtaaacgcagtgatttcacgcagcggcgtgctggcgaatcgctttgagtatgagtggtacggcccatgggaaaaagtggtcggaaaatttcacatccgcaaaggtgaaaaaggcgaataccgcgttcctggctggaccatggcggacgaagcaggtatcggcattatcatccgcgcaacgctcaaaggcgaagatcacccccgtgagctggatctgctgctggctcaggcccgcacccgtaattcgacactgtgggctgacgatccccgccagcaactcgcctatctggcagtaaaacgctgggcgcgtctgttctgtccggatgtgatcctgggcgtttacacacctgatgagcttgaagatcgtcaggaaaaagaaatcaacccagcaccgcagcagcgcgtaagcgttgctgatatcccggctgaatcgacaactaacagcgcgcaagagtccggtaccaatattgatggcatggccgacgagttccgcgatcgcattgaagtagctcaatccgtggaccaggccaaagccgtgcgggttgatattgaagcagccaaaactactctcggttcggcgctgttcactgagctgaaaaacaaagccgtacggcgctactacctggtagacgcccgcaacaaggtggaagcggcgatcaactccctgccccagcctgacgaaccggatgctgcagagcagttcaccaaagcagagcaggcactggctgctgcgaagcgccatctgggtgacgagctgtatgaccagtttgccgttaccctgctcgatatgaagcccgaatacgtggcatga

SEQ ID NO: 760 - DNA, 639 bp, Kosakonia cowanii
  source 1..639: mol_type = genomic DNA
atggcaaagcaaggtgtggggttgagcatggctaagaaaccccgtcgtaaatgcgcaaacctgagctgccgccagtggttcaacccggtccgcgaagggcaagtggtttgcagctttgagtgcgccagcgccatcggcaaagaactgacagcaaaagcccgtgaagccgctaagcagaaggagctacagcggcagcgcactgaagagaaggctggccgtcagcggcgcgctgcgcgtcgtaaggagctcaagccgatccgtcactgggtgcagatgactcagcgtgcattcaatgactggcggcgcgaaatgctgctggccgccgggcacggatgcatctcttgcggtaccaaaaccgcttttgcctggcatgccgggcattaccgcaccacagccgcagcaccgcaacttcgctttaatccggacaatatatggctccagtgctctgcctgtaacgtccacaaatcaggcaacatcgaggcataccgcgtcgctctggtcgagctgatcggcgaagagcgcgtgctggcgctcgagtccaacaacgaaacccaccgatacacccgggaagaactggacggtatccgcgccaaggccagggcagatcttcgagtactgaaacagcaggaggctgcatga

SEQ ID NO: 761 - DNA, 3396 bp, Kosakonia cowanii
  source 1..3396: mol_type = genomic DNA
atggaatttttctacgtggttaaggccactcagaaatccggtaagcaagatgcagtgatttggttcactgcgaaaagcgaagcacgcgccgccctgacgctcgatgttgagctggaagaggctggtatcgaaaccggccgtggtaaagattacgtcaagccgatccgtaccgacatgcctattgttggcgacctgcctgaggagggcgtcgtcgatttcacctggtgcgatcgttatcaactggctgacgaccagcgtacctggaacgtgatccacggtgccgcgccacaggatgaaacccaccttgcccaggccagcaccataaacgatgcagatctccccgccgcgctggtaacggctacggataccgttgatgcgggcaacacctcccagcttgaaaatcgcaccccgtctgtccgcttagccgtccatctgctgggcgacaaataccattcggagatcagccaagaacagcagatcgtcgccaacgaattggctatggatgaggcaaatgtatatttccagaacctgctgcaggccaaaaatgaagttcctgatatgagcgaactcagccttcacgctgagtggaaactggtgcaggctgtcaaagacgttttcccgcaggataaagaacacgaacccgcgctgctggctgctttcatgtcgagctgggttaaagcagaggtcggcgaacgtgcccaactggttgaagactggctcggcggcaaactgcccgcccctgaagtcgccgacgccagcgaacctggtgatgatgcgcctgtttccaatgcagaagatcagcaggatgctacgcccgaagaggttgcccaggcccacgtacaggcatttcgcgacagggacattaccgaactgcacgctgttcctacgctttcgttccgtcatcgcctcctcgcgcagtttattaccgagaaggaatacgcgtaccacattgacaatgaacaactgaatactgtgcgccagctggaaatggacaccgataactcctacgtgcaaaacctgctgctggccgccgagaatgtcgaggggatgaaaaatcttcgtgacttcgagttctggaggcttaccgatgctgttaagcgcgtatttccttctgacaaagcgacgcctgatttatctctgatgctccagttcatgaaggcctggaaaacgacggactatatcgatcgcggcctgctcgctaaggaatggattaacggtaaccgggtttcaaccattcagcgcaccgacaccggcacgaacgcgggcggcggcatcaaaacagaccgtaatgcagactatgagcatacgttggacacacttgatattgagatcgcctgcgcaactctgccgatggattttgatatttacaatatccccggctctattcaccgccgggctaaagacatcgttgctgcaaaagaaagcccctggaaggagtggtccgcagcactgcgtaaaactgcaggtatcctggattattcgcgcgctgcaatttttgcgctcattcgtgaagcgtcctcaggcatgacacagtttccggatcgcatgactggctatatcagcgcgacactcaatgaatataagcatgatacacctgaggccagaatcctcgccgctgcgcgacagattgacagcgcggccgtggttgccggagtcattcagggcaccgagccgtcacaccagctcgtcaccaccgctcagccagaagtagccaacctcggcggcggcatattttccatcgatggtctgctggatgaaaaagcaaacccggtcatcaataccccctcaaacgaagtcgaaaaacaggaagtggagatcgttggcagtgtgcagatggaagagactgacccgagcaaagccgaagcttgtaatgcgttaccagcagtcgaagtcgttgatgaagctgctgcgcaaacagttagcgtaagcccggcggatatcctcgccgctgccacaccggaactgacgagcaacgttgccgccgatctggaccagaatatcgatgctcttagccagtatgagccggaattatctccaaccgaaccagaaaagacagaaataggaccggtagcggatatttccgagccagaggctacagctaaggaatggccagcttacttcgaaccaggccgttatgaaggtctgccgaacgacgtttaccatgccgcgaacggcatcagcagcacccaggtgaaggatgccagtgtctccctgatgtatttcgaagcgcgccacgtctctaagaccatccagaaggaacggtcgaaggttctcgacatgggcaatctggtgcatgcgcttgcgctgcagccggagacgctggccgccgagttcagcattgagccggagatcccggaaggtgcactcaccaccacggcgacgatccgcgagtgcattgacgagtacaacgccaccctgccgccgcagctgagcgctgacgatatcaaagcgctgctggaggcccataacgccacccttcccgcgccgctgccgcttggcgcagcagtagacgaaaccgcagaaagctatatggcgctgccggaagagttccagcgcatcgagtctgataagaagcagaccgctgcagctatgaaagcctgcataaaagagtacaacgccaccctgcccgctccggtgaaaaccagcggcagccgtgaagcactcctcgagcagttggcaatcattaatcccgacctggtagcgcaggaagcgcagaagccacagccactgaaagtttcgggtacgaaagccgacctgattcaggccgtcaaggcagtcaaaccagatgctgtgtttgccgacgagctgctggatgcctggcgcgagaaccctgaaggcaaggtgctggtgacccgccagcaactggaaaccgcgctggctatccagaaagcgctgcatgcgcacccgaccgccggaaagctgctgcagcatcctgatcgcgccgttgagactagctatttcggcatcgacgaagagaccggcctcgaaatccgtgtgcgccccgaccttgagctggacgtggatggcgtgcgcatcggtgctgacctcaaaacgatttctatgtggaacatcaagcagtcaggtctgcgggcgaagctgcaccgtgaaatcatcgatcgcgattaccacctgagcgccggtatgtacatggagacggcaagcctcgaccagttcttctggatcttcgtcaacaaggatgagggatatcactggattgccattgttgaggcttcgcaggagctggtggagctgggcatcctggagtaccgcgccacgatgcgcgcaattgccaacgcattcgataccggcgagtggccagcgccgatcaccaccgactataccgacgaactcaccgagtacgatctgcgccgccttgaagcgttgcgcgcggcttaa

SEQ ID NO: 762 - DNA, 165 bp, Kosakonia cowanii
  source 1..165: mol_type = genomic DNA
atgggcacgcagtggcgcacgggcatgggcggcatcaccgggctggattacaatgtcctgccctggctgatgaagctgaacggagtggaggatgaggcaaccgcgttaacagatatccgcgtaatggaaagcgtggcgctgaagattatgcatcagggggcgtaa

SEQ ID NO: 763 - DNA, 684 bp, Kosakonia cowanii
  source 1..684: mol_type = genomic DNA
atgggcttcgcattacctaatggcgccacggtatttgtcggctcgaaacttgccacgcctgtggcggtaacgggcgtcagcaatgccgcaggcgctgtctttaccgttgcaaacggccacggccacggcctcgctgtaggcgatgtggtgctggtttccagtggctgggcactgattgacagcctggttgcgcgcgtcacggcgcagacgactaccagcgtgacgatcggggtgattaacagcaccgataccaacttcttcccggctggctccgggacaggttccttaagcaaagtagccgagtggactgagatcccgcagatcaccgaagtttcacagtccggcggtgaccagcagtacacgcagatccagttccttgccgatgaccgccagcgcaacctggcgacctacaaggcggccaagtcgcagacctttacggttgcgcatgactccacgctgcctatctatgccgtgctgtcagctgctgaccgttctggtgacacgctgccgctgcgcatgtacgtgccaaaggcgaaggaaacgcgttactggtcaggtaagccgtctttcgatccgcagccaaccactgcgccgaatgccgtcgagacggtacagccagcgtttgccatccagtcccgcgatatcaccttttacaaagatgctgccccgcaggcagccgcttaa

SEQ ID NO: 764 - DNA, 609 bp, Kosakonia cowanii
  source 1..609: mol_type = genomic DNA
atggcagataaccgggcgtttatggtgtccattaatgcgttcgtcagccaggcaaaggagcgacaggaggaagtggtgcgggtggtcggcatcaaaatcctggcgcggctggtgcagatgtcgcctgtcggcaatccagagctgtgggcagtgaaccagacggcggcggcctataactcggcggttgcagagcacaacctgaggcaggtggccgatccggctaatctgaccaaaaccgggcgactccgcaaggcggcgcgggttagcgacagcatggatatcaaggcaccgcctggctacaccggcgggcgttttcgtggcaactggcaggtctcttttgattcgcgcactaccgacgaaacggggcgggttgataaagctggccatctgacgatggctgccggaaatgtcactcttggcctgtttaaagtcggtgtgcgcgatatctacttctgcaataacgtcccgtactcataccgtctggagatggggcattccagccaggcgcccggcggcatggtgcgcatcaccgccgcagagtttcagcggtatttcaaccaagcagtcagcgaggttaaaaatgataccggacatcataacggcgcttga

SEQ ID NO: 765 - DNA, 483 bp, Kosakonia cowanii
  source 1..483: mol_type = genomic DNA
atgatcattaccgatatcacttcaccggccatgaacagctatgcaggcgagggggatttgaaagcctttgccgatctgcgcgatatcacgctgccggaaaagatcgcgccattgctcatccgggcgatggattaccttgaggggctggactgggccggctggcgaagcgaaccaaagcagccgctggcgtggccgcgcgcgggcatcgaactggacggatacgaactgcccgccggagaggtaccgcatcaggttgttactgcgcaatgcatgctggcggtcgaggcgatggatggcgatctgctgggcagtgtgcgagaagcagctgtgaagtccgagcgcgtggagggagccgtaaccacgacttatgccgtcgctgacggcgaagtgttcagaccgtcttacccggcggtgatggctttgctcggcgagctggctggtggtcgtggctatgcagtaaacgcttttgcggagcgtgcgtaa

SEQ ID NO: 766 - DNA, 690 bp, Kosakonia cowanii
  source 1..690: mol_type = genomic DNA
atgaaccacgaattgtttcatgcagtacagagccgcgacggcgaaatgctggcgcgcatggcgggcggcagccgcgagcaggccaaggtgatcaacagcgacgccgagcgcatggtggatctcctgttcagtcaactcaagcaggtctttccggcatccacgcagaccaacctgcgcagcgaagcggatgagcgcacggccaaacagcagtggatcgccacgttcgccgaaaacggcatccggagccgcgagcagcttgtagccgggatgcagaaagcgcgctccagcgtgtcaccgttctggccatcgccgggacaatttgtcgcctggtgccgtgagggcaaggggctgttaggtatcagtccggcggacgtcatgatcgaattctggaagtggcgcaagctcgtttataaataccccaccagcgagcaatacccgtggacacagccgttgctgtatcacatttgtctggaactgcgccgccggggcgttgatcgccagatgaacgagaaagagctgctcagtgaagccgggaatctgctggcgctgtgggaaaaacgtgttgccgaaggtaagccaattccgcctgttcgccgcgcgctggcagcgccgcatcaggaccggggacctacacctgcagaaatgctgatggccgagtacaagcgccgccaggcgcagggaagggattga

SEQ ID NO: 767 - DNA, 312 bp, Kosakonia cowanii
  source 1..312: mol_type = genomic DNA
atggccactaaatttcaactccagcccaaaccgactttcaaagcagacgtcatcattccgcgcgccggcgaagatgatggcgtacttacgtttaccttccgtcataaaccggtcaaagaacttgctgcactcgaagaaatcgagggaaaaacggctatcgacttcctgactgaaatcaccgagtcctgggcactaccggatgagttcagtcatgaaaatctggagatgctcctggataactaccccggcgcgatgaaagcgatcgtcggcacctactaccgagagctgacaggtaaccgcgaaaaaaactga

SEQ ID NO: 768 - DNA, 411 bp, Kosakonia cowanii
  source 1..411: mol_type = genomic DNA
atgataccggacatcataacggcgcttgagtccatgctgggtctgtgggcagatggcgagggcgtgcgggtggcatgggataacattcagttcgacccgcctggcgacgggctgtatctgatctcacatgatatgcctgcgcagccgtacagcattgatatggccgggggctgccgggtctaccccggcgtgtatcaggtcaccgtcgtcgcgccagcgggtggcggcaaatcacaggccagagtgctggcccaccgcgtcgccgggttgttcccggagaaccaagagatcccaggcgacggctttatcgcctgggtgacatcaccgcccgccatttatcccggcatagcggacggcgtgtcctactccatccccgtcagcatcaactaccgggctgatatctcagcttga

SEQ ID NO: 769 - DNA, 351 bp, Kosakonia cowanii
  source 1..351: mol_type = genomic DNA
atgcctgttaactacactcgcatgaaagccacaagcacgcgcctgctcactgagaacggcgcggcgtacccagtaaagcgtaagggcacagtaacggtcatcggcggcgttgagcatcgcgagccggataagaccttcactgcgatcagcgtgcggactgagtatagacccggcgaaattgacggtacggtcatcataaacggcgacatgcgtattatgtttactgctgataccgagctgcgcaccggtgacatggtggacgtggacggcaaatggtaccgcattgagaagcccaacccggtcaatcctggcaagctgctgttgtgctaccgcgctcagctgagggcatga

SEQ ID NO: 770 - DNA, 771 bp, Kosakonia cowanii
  source 1..771: mol_type = genomic DNA
atgttaatccgaaatatgctcctgaaatactacgcaccagaagatgatggccagggcggcgggggcggcgataccgaaattacgccagaaattcagaagctgattgatgatcaggtcgctgcccaggtctccggcctgaaaaccaaaaactccgagctgctgggcaccatcaagcagcagaaagacaatctgtctcgctttgacggtatcgacccagatgcggtgcgcggcatcctgcagcgattttctgacgacgaagaggcaaagctgattgccgccgggaaaattgatgaggtgctggataaacgcaccgagcgcctgcgcgctgatgttgataagcagatcaaagcggccaatgaacgcgcggataaagccgaagcgttctccggcaaattccgggatcgcgttctcggcgatgccatccggtcggcagcgtcaaaagctggcgcactggcggaagcatccgatgacctgatcctgcgtgccaaaggcacattccagctcaacgacgaaggcgaggccgtagcagttgatgcaaatggcgacgttctgttcggtaaggacggcaaaaccccactaagcccgcttgaatgggcggagtcgctcaaggagacggccccgcacctgttcccgcgcgctgaaggtaccggcgcgggtggacacaagccaggcggtggtggcagtcagaaacgttcagagatgagcgccagcgataaggcggactatatccgcaagcatggccagcaggccttcctcaaacttccgaaataa

SEQ ID NO: 771 - DNA, 1407 bp, Kosakonia cowanii
  source 1..1407: mol_type = genomic DNA
atggctaataacgacatcacctgggttcgtcctgagcaccgggcggccagtgctgcctggaagaaaatcagggacttttgcaaaggggcagaggcggtaaaagaaccgggcaacaactatctgcctttacttgactccacagacaagagcatgcgcaaccgcaagcgcaacgaagactacctgcagcgggcggtcttctatgcgattactggtaataccaagattggcctcctcgggctggcttttcgaaaggatccgaccttttccgcgccggagaaactgagctatctgctgaagaacgccgacggcgctggcaccagcatttaccagcagtcgcagctggtgaccgagaacgtgctggaggtggcacgtgacgggctttatgtcgattacgctgagggtagtgggcaggccattatcctgcgctatctggccgagaacatcatcaactggcgcacgaagcgcatcaacgggcgcgatcagttggtgctggtggtgttgagggaatgtgtggagcaggaggatggctacgcgttcaaggatgaggtccagtatcgcgagcttgcgcttgaagagggccggttcatctgccgggtgtggcgccgcagcgcggatgccggttccgctgtatacgctgttaccagtgaataccagccgaagcccaaaggcaaagacagctgggacgaaatcccgtttaccttcgtcggcgcgcagaacaacgatccgactatcgacgactcaccactcgccgcgctggtggagataaaccatggtcacttccggaacagtgctgattacgaagacagcgtgtggttctgcggccaggtccagccctacatgacgggacttgatgaaggatggcgcgatcatctggaaaagaagggggttaaaattggctcccgctcgccgctgctgctgcccagagagggcaactttggttatgcccaggcgcaacccaacatgctggcgaaagaggcaatggacagtaagcgcgactacatggtgcagctgggtgcccggctcatcgaacagaacgcggcggttaaaaccgcaacgcagtccagcagcgagcagacatcgtccacttctgtactggggatctgcgtctcgaacgtatcggaggcctattcactggccatcggctggtgcgcgaaatatctgggcgtcggcgagcagcaggcggcctacgcgatcaaccaggagttcattgctaaggtcgccgagtccggcatggttaccgccattgtgaacgcctggcagtccggtgcaatccgcgacactgatatgattcgtgcgctgcagaagcttgacctcatcaacccagcagacagccccgacgatatcattgacgaactgcacaaccccacccccaccctgattggcggtaacaatggcaacggtaaatga

SEQ ID NO: 772 - DNA, 1311 bp, Kosakonia cowanii
  source 1..1311: mol_type = genomic DNA
atgacggggatatcgccgacccttaacgtaccgcaggcgcagtttctggctatgccgcataaattcaaggcctacgtggcgggcttcggttccggtaaaacgtgggtgggctgtggcggcatctgcaaggggatgtgggaacatcccaaaatcaaccagggctacttcgctccgacctatccgcaaatccgggacatcttctatccgacagtggaggaggtggcgttcgactggggccttaaggtccagatcaacgagagcaacaaagaggtccatttctacgccgggaggcagtaccgcggcaccaccatctgccgctcaatggagaaaccggccacgattgtcggctttaaaatcggcaacgcgctggtggatgagctcgacgtgatgcccgccctcaaagcacagcaggcctggcggaaaatcatcgcccgtatgcgctataaggtcgctggactgcgtaacggcattgacgttaccaccacaccagaagggtataagttcgtttatcagcagttcgttaaggcagtgcgcgataagcctgagctggcaaccctgtacggacttgtgcaggcttccacgtttgataatgaagcaaacctgcctgatgactatattccctcgctgcttgcgagctatccaccagagctgataaaagcctacctgcgcgggcatttcactaacctgacaagcggcaccatttaccaccagttcgatcgcaggctgaacaactgcgcagatgaagagcagccgggcgagccgctgtttatcggcatggacttcaacgtcggtaagatggcagccatcgttcatgtgaagcgtgaagggttgccgcgcgcggtgcgggagttggtgaaggtctatgacactccggcgatgatcaaacgcattcaggaagagttctggcgctatgagggcggccgctacgttgccagccgccagatctatatatatccggatgcctccggcgacagccgcaaatccaactgcgccagcctgaccgatattgcccagcttagagaagcggggttcagcgtcattgttaacgcttccaacccgccggtgaaagatcgtatcaactcgatgaacgccatgttctgtaatgcgctgggcgaacggcgttacctggttaatgtccagcgctgcccggtctatacggaaagccttgagcagcaggtatgggataaaaacggcgagccggacaaaaaggcagataacgatcaccccaacgatggtggcgggtatttcattgttaaggattaccccatcgtcaaacctgcatactcaatcactatggataccaccttctga

SEQ ID NO: 773 - DNA, 933 bp, Kosakonia cowanii
  source 1..933: mol_type = genomic DNA
atggagaaccagaagaccggtttcatcccgttgtaccggagtgtactgaagcagccatgggggaaagatgtttatcttcgcaccctgtgggataacctgcttcttaccgctgcgagacagccctacacggctaattttaagggccgtcagtggccattgcagaccggacaactggtgaccaccacagccgatctggggctggctttatgcgaccggaacggggaacccaccagccgtcacgcagtggaccgtatgctcgctttttttgaacgagaagggatgatcaccaccgccggtgaacgccggaagggcacggtgatcaccatcacaaactacgcgctttatgctcaaaaaatggacgatttacccgcgcataacgccgcgcataacagcgagcattaccccgcgcataacgaatccagtaacggcgcggcttcggagggtagtgccgcgcataaccccgagcataagggcgcgcttaagcccgcgcatcatgaacaagaagtaatattaaatactaacgtatttaatgatcgtcagaaaaaatctaaatctcttcctgatgctgcagttcagacccccgcaggtgacaagtggggtaccgctgaagatctgcagtgcgcagagtggatgctcgccctgcgcaacatcaccaagccttcgatgaaaaaaccgaacctcacaacctgggcgaatgacatccgcatgatgcgccaactcgacggccgcacgcatcgcgaaatctgtcagctgttcaaatgggctgcgcaggattcgttctggcacaaaaacatcctttcgcccgccaagttgcgtaaacagtggtacaccctggagctgcaccgcgaggatagcagccgtaagcccatcaacgatgcaccggccagtgacgcgcactggaatagccctgaagcctggaaggatttcatatga

SEQ ID NO: 774 - DNA, 954 bp, Kosakonia cowanii
  source 1..954: mol_type = genomic DNA
atggctacaactgttaataacgatctggtcatctatgacgatctggcgcagaccgctttcctcgagcgccgccaggacaatctggaagtgttcaacacttcctccaacggcgcgatcctgctggacaatgaactcattgaaggcgacttccgcaagcgcgccttctacaaagtaggtggctccatcgaatcgcgtgatgtgagctccaccggcaaggtgaatggtaaaaaaatcggtgccggtgaggcggtgtctgttaaggcaccgtggaaatacggtccgtacgaaaccactgaggaagcctttaaacgccgtggccgcacggttgacgagttctccgaagtgattggcgttgatgtggctgacgctaccctggaaggctacgtgaaatatggcctgaaggcgctgacggcggcaatcggagcaaacaccgatatggtggtgaccgccgatatcgaaaccgacgggaagaaaaccctgacgcgcggcctgcgcaaatacggtgacaaattcaaccgcgtagtgctgttcgttatgcactccgccacctacttcgacattgtggacgaggcgatcgccagcaagatatacgaagaagcgggcgtggtggtgtacggcggccagccgggtaccttgggtaagcccgtgctggtgaccgataccatggatgccgccgctattctggggttggtggccggtgcggtgaccgtgactgaatcccaggcgccgggcttccgctcctacgacatcaacgatcaggaaaaccttgcggtcggctatcgcgcggaaggtacagtcaacgttgagctgctgggctacagctgggacacggccaaaggcgagaacccggatctgaccgccatcggcacggccggtaactggaaaaagcatttcacgagcaacaaatccactgcgggtgtgctgatcaagctgggggccgcatcgggggagtaa

SEQ ID NO: 775 - DNA, 597 bp, Kosakonia cowanii
  source 1..597: mol_type = genomic DNA
ttggcgcaattacaactcatcaagcagtccgctaatatcctgatccccgctacgccggagaccagcgatttcctgcagtcgaaatgtaagctcggcgccgtgctggtggccgatttcaaacaagtccgcaacccggcttttcaccgtcgtttcttcgctttgctgaatctcggcttcgaatactgggagcctaccggcggggcgatctcctccaatgagcgcaggttagttaccggctatgccaaatacctggcatctttcggcgggagcgaaaccgcgctgcttgatgctgctgagcagtaccttgatcgtatcgccgataagcgcacgggcagcatcagtgcctgcaaatccttcgacgcctatcgtgcatgggtgactatcgagtccgggcactatgacgccatccagctgcctgacggaaccctccggaaacatccccgcagcattgccttcgccaatatggacgaatccaagtttcagcagctctacaaagctgcgctcgatgttctgtggcgctggctcctgtccaggtcattcagagaccagcgcgaggctgagaacgctgccgcgcagttgatgagtttcggggggtga

SEQ ID NO: 776 - DNA, 1086 bp, Kosakonia cowanii
  source 1..1086: mol_type = genomic DNA
atggcaacggtaaatgaaatgttacgtgacgaagccatagcccacaccgtctggatcagccgttatagcactggtgtggcaaaccgcatggttaagctgctgaacgacagcgacgctgagcttaccgcacggctgcttttggcgatggatagcctgcccaccagtcagtttacggtcagccgactggaaagcatgttggggagcgtacgcgagcttaaccagcaggcaatagcgggcatgcagaccagcctggaggatgagctcctgcagctggccgggcatgaagcaggctatcaactgagcctgtttgattcactgctgccgcagcgggtgaaagagcggtacccgctgcagagcatcacgcctgagcagctttacgcggccgctatggcccagccctttcagggacgtctgttgagcgaatgggccgataaccttgaagccgaccgcatggcacgcgttgttaatgcaatgcgtcgcggctacctgcagggtgataccacggagaccattgcccggcaggttcgcgggatcgccagcaaaggctataaggacggggcgctgcagctcagccggaccaatgccgccagcattaccaaaacggctgtgaatcacctggcagccacggcgcggactaattttgcagaagccaacggcgatgtcctgaaaggtaaacagtggctctccaccctggacaacaaaaccacgccgacgtgcatcatccgtgatcgcctccgttacactctggacaacaaacctgtcggtcacaaggttccgtatctgcaggggccggggaaaatccatttctgctgccgttccacggagacgctgattaccaaatcatggcgtgagctcgggatcgacagtaacgagctggatgaagatactcgcgccagcatggacgggcaggtgccagcggataccacatatcttgactggctggcccggcagtcgctgccgcgacaggatgagatcctcgggccggagcgggccgcgctttaccgcgctggcgagctgaagctcggggaaatgttcacagacaagggggaatggataagcctggcccgtcttaaagcgctcagttga

SEQ ID NO: 777 - DNA, 201 bp, Kosakonia cowanii
  source 1..201: mol_type = genomic DNA
atgaaagagacctggttctatcacatggaatgcaccacggagcaggcagaagagctgctggcgcaataccgccgccgcggcgttaaggtcgagcgcagcctcaaccctgatctcattacctggactgtcagcgcccagctgccggagggcaatcatccgccgcgcccgagccgggtatggcaaagcaaggtgtggggttga

SEQ ID NO: 778 - DNA, 324 bp, Kosakonia cowanii
  source 1..324: mol_type = genomic DNA
gtgtgcaaccgcttaaaaccaaagcaaaagaccatcgtggagttcatcaagaaaaacggaccggcaacgccccgccaaatccgtaagctgctcgactgcgacatccgtgaggcctacgaccgtctcaagcgcctgggtatggccgggatcgtcaaaaatatcggcaaaccgaagcatccggaataccagctggtgcagcgctggcaggaaaaaattaagcagccgaagccgcggataccagcagcgccatcagcgaccgatttatgtcgccagaactggcagggctacgaaattcataaaatttttgggagtgcgcgggcatga

SEQ ID NO: 779 - DNA, 564 bp, Kosakonia cowanii
  source 1..564: mol_type = genomic DNA
atgcaaatacttacttttcaacagagtaatggaaataacgccgacccgctgagatcgaattatcaaggcgttccgcgcaataactgtaagctcaaaaatattcgggaagcagtgaaggcgtggaaccgtgctacccccggccccgctcagatgcatatatcgcagctggtggccgaggagtggaaagctcgaggcgggcgcggtctgttactggccggttctgaacacaataccaggcagaattttttccgcatgattaacgatcccggcccgaagaacgacaaaaacttgatgctccttattccggtcatcatcaatgttatggcgcgtgataacgagcaggtagcgcgccggttcgggcttatcagcggaaagaccaaggcagagctgattgctgatgcgatgaaagaatgcgccgaagcaaagcaggccgtcctgctcaatgtaccagagcaccagaagctgaaagaggtcagtgagggtatcgcgtcgctattcaggctgatgccggagcaaaccgggtcgctgatgacgatcgtcatgtcaatgctggggggaatatga

SEQ ID NO: 780 - DNA, 129 bp, Kosakonia cowanii
  source 1..129: mol_type = genomic DNA
atgacagtcctgaaaatggtgaagaccgttgtgcgccaacacagccggtcttcgggtgcaattacggtcagcaatcgcgaggtcattatgacaaacgcatttttaaaataccaggtgaaaggggcatag

SEQ ID NO: 781 - DNA, 810 bp, Kosakonia cowanii
  source 1..810: mol_type = genomic DNA
atgtctgaacataaagtcgttctgattaccggtgtttcatcaggtattggcagggcggcagccctggccttcaaggccagaggttgtcaggtatttggtaccgtcagggatatcaacagcgcttccccgttgaatggaattacgctgacagaaatggatgtgcgggatgaacattcggtgcaacaggcaattgaaagagtgatagccaaagccggatgtattgatgtcctggttaacagcgcgggtgtgtccctggttggggcagttgaggaaacctcagtggaggaagccacccggctgtttgataccaatttctttggtgcattacgtacgaccagagctgtgctgccgcacatgagaagccagaaaagcggacgtatcgtgaacgtcagctccgtgctgggctttctgcctgcgccctttatgggcatttatgcagcctccaaacatgccctggaaggcatgtctgaaacacttgatcatgagctacgtggaagcggcgttcgtgccacgctggttgagccttcttttacaagaacaaaacttgatgtcaactccgctgaaacggcagaaaagatagcgttttataaggatgcacgggaccagactctgggggccatactgaaaaaagccggtacggcgtccttacccgaggttgtggcagggacaattgtggccgctacacttggcccatggaaaatgcgctataccccaggaggtgaagccacactgcttgccagattacgccgctttgcgccagcaagtatggtcagtaaaggactaagaaaaacctttgaaatgaaagaatag

SEQ ID NO: 782 - DNA, 588 bp, Kosakonia cowanii
  source 1..588: mol_type = genomic DNA
atgcgcctgaatgccaaagagctgatcgccgaagccagagtgactgcctctactctgccaccagcagcagcaaagttaatgaccgctatggcagaccgcctcgatctacagttcgtggcgctgtgcgaatcgcgtaatgaagtgaagcagctggctgcggagaatgcggcgctaaagtcgaacctaatgttttgggatgcagaagaccccgaagtgccttattgcagtcctgaagatatcgccaatgaaatcatgctcggctacaacgaggaatttgatgttcaggttgcggccaggcttcctaaccgtaaataccgggtatgcaagcttactgagtcggagcgcgagattgaattactggatggtggcgatattgcaacccccgccaccgacgtcatcctcgactccctgcgcgcagaagcgattagtgacgctctggaaaatagctctgaatatcacgataccgactgcgttatggaccgacatgacatcagttatgtagatgcggaattgcgcgcagctggtgccatggaattgcatgattcgttggttgcagtagcaagcgatctccggaataaggcaggttaa

SEQ ID NO: 783 - DNA, 1269 bp, Kosakonia cowanii
  source 1..1269: mol_type = genomic DNA
atgatttatacaactggctctattgctgtcagcgacaataccctgaccggcaccggcacaaatttcaccgcagccgactctcttatccgttccggctgcacggtgctggctctgaccagcccggcgcaggcattccagatcacagccatcaccagcgcgaccagcctcactgtaactccggcagccagcccggcagtgcccccgggcacgaagttcgccattctactgagcgacagcctttccgttgacggtctggcgcaggatattgcggagacgttcacaatgtaccagcgctacatgggcgggtttgctgacgttatgaaaggtgtcggcgacgtgacgatcaccatcaacggcgaaccggttaccgtaccgggccagaaatcactggtgaagaagggggctaactctgacataacctctctgagcggactcactaccgcgctgagtattgagcagggggggactggtgcaaaggatgctgcaggtgcaagaaaggcgcttcagcttggcggtgcggccacacttgatgtgggtactgccgcaggcaccgttgcagcgggaaatgatccacgactcaccactctggatggtaaatccggtggttccatcactggtcgaatttcgatgcctgccggtgccgtagggacttacctcagtgcttcccagaatgcgggcgtcagacagcgtgtggtaaacgacacatcagcgacgagcgcagtaggtgcgctgacgtgggggtataacaacggcagtggttttcagctcgatacaacctggggttcagtggggcttggcgcgtcggcgtggccttacacatttatgatgcagaccgctaatgaaacccagttcggtgcgcgtatctggacgttctctatgtcgagcggcgacattatttgcagtggatcaggtaaccaggcgggtacttttacttttactaaagcatcgaactctgaccgggagatcaaacacgatatcgtgtacaccgacgggcaggaatcatacgagaatgttaagaaatactcacccacatcattcgtctataacgacgatcagcagggcagaaagcgtcgcggagtaattgcacaggatgtgcaggagatcgacccggaatatgtacgcgccatccttaaccctttcacgttgaaaacgagcctttccctcgacactaacgtcatgctgcttgatgtggcgctggccctgaaagtggctatctcaaaaatcgaggctctggaagaaactgttcaacagctgcgctatggctcctga

SEQ ID NO: 784 - DNA, 711 bp, Kosakonia cowanii
  source 1..711: mol_type = genomic DNA
atgcgggacaagactataagcgcaattctggcgcatgcggcgcaggcgttcccggctgaatgctgcggtgtggtgatccagaagggacgggttgagaagtatgtcgcctgtcgcaatctggctacctccccggaggagcagtttgaactgtcaccggaggattacgcggcagccgaagagcagggcacggtggttgctgtggtgcacagccaccccggcgacggcgccacgacgcagccaagtgaactcgacatgctgatgtgcgatgcgaccgaagttccgtgggtgatcgcttcatggcctgaaggcgatatccgcaccatcatgccgcgcggcgatcgcccgctgaccgggcgtcagtttgttctcgggcacgctgactgctggtcccttatccgggattacttccgcactgaacacggtatcagcctgcccgactacagcgtcgagcgtcactggtgggaggagggtgaaaacctctatatggataactggcactcatgtggattcagggagttcgacggtcccccgcagcccggcgatatggtcatcatgcaggtgcaggccagcgtgccaaatcatgccggcatcctgctggaaggcaacatgctgctgcaccacctgtacgggcagctcagccagcgtattccgtatggtggctattaccgtgatcgcaccattaaagttttacggtacaaggatctgatgtaa

SEQ ID NO: 785 - DNA, 339 bp, Kosakonia cowanii
  source 1..339: mol_type = genomic DNA
atggcagttgagaccttctcctggtgcccgaaggtgtccgcccaggcagatatcagtttccgcacccgtaaagcgcagttcggggataattatgcacaggtgtccggggacggcatcaacccggtcacaccgcagtggagcgtgagttttaccggggatgaagagtatgtccaggccataaaggcgtttctgaagcggcatgccggctggaagtccttcatctggaaaccgcccctggagcccgcggggttatggcgatctgaatccctccagatagccacccacggcgcagatctttacaccctcagcaccacattcattcaggcataccatccatga

SEQ ID NO: 786 - DNA, 2028 bp, Kosakonia cowanii
  source 1..2028: mol_type = genomic DNA
atggggcgcgcgcttggcctgataggtggtgttccggggctcgttatgctcggtgcgggagcctggtatgcaatgtatcagtctcaggagcaggcccggcagtcggcacaggaatatgccagaactattgatcaggtgagccaaaaaacgcgagcaatgagtttgcctgaagcagatgaaaatcgcggtaaaactattgatgcgttagttgaggaaaatcgcttaattggagagcagcaaaaagctatttcagcggtaaaaagacaaatcgatgatctgaataaggcacgcgctcaacccgggcttactaaagacaatgatcttaatatagttagagcgctcgccattcttaccgaccaattaaccgttgaagaaaataagcttaatttgatgcgggagaaatcaaccagtattcagcaggtgctggaagggattgatcgccgccgaaatgatttgatacgtgaacaggcctggcgtcagaatgctgcgtatcagtctctgctgatgatgaacggtcagcatcaaacatttaaccagcttcttggcctcggcaatcagctactgatggcccggcagggaatgactctggcaccgctgcgtgttcctcaggcagaagcctcgcagaaacagaccgatgcgctcgaaaaaagccgccgcgaactggccctgtcccgacttaaaggtgaggcaaaagagcgcgcccgccttggctatgctgctgatgagctcggtctgacggctgatccgcaattccagaccaaccggcttgagtacatcaataacgggcttgaagagtggcgcaataacgaggccaacaagaagcagcctaaaggtccaaagacggacgaagaaaaggccgctgatgcttataaaaggatgattaagcagcagaaggagcagatcgccctgcagggccagagtaccgaacttgccagggtaaaataccaggtggttgaaggcgaactgtccacgctggacaaggcgcagaaggctgaactgatgcgcaacgctgccataatcgatcaggtaaaactgcgtgagcagctgcgtaattacgaggcgaatctggctgacagcaacgccggcgcccgggcggccaatgatgcgcagctcattggttacggtcagggcacccggttccgtgagcggatgcaggagcagtttaatatccgtaaggagtttgagcagaagaataccgatctgctccggcagcggcaggccggtgatattgacgaaaccttctaccagcagggactggcactcaacaaacgctatctggaagagcgattgcgcgaccaggaggggtattacaccgattccgatgcgcagcgcggtgactggttaacgggcatgtctgagggctatgcgaactgggtggacgaggcgaccgactattccgcgatggctgccgacgggatgaagcaggccatgggcggggcagtgaccaccattaccgacatgctcaacggcaatctcgacagctggaaagactggggcatgaacgtgctgaaaatcatcgagaccgttctcgttaatatgatggtcgcgaatgccgcgagttctctcggctcacttttcagctttggcgcctcatccgccgcaacggccagcagcgggacggccattcagagcgccgcctcaaacttcaccttcaacgccaaaggcggcgtctacgactcaccctctctgagtgcctacagcgggggtgtctaccagaccccgcagctgtttgcctttgcgaaaggggccggggtgtttggcgaagcaggtccggaggcgattatgccgctcacacgcgcggcggatggttcgctcggcgttcgcgcagtcggcgcgccgcagttttccggcggtggcccgtcagtgtcgtttggcgatatcaacatcaacggcggtgcgcagtccacggcagggcagggagcagccgcaactgccggcaggcaactcaaggatgcaatcgtgaccgtaattaatgagcaggccagcatgcccggatcgcctttgtggcggcttttgaaaggagcgtaa

SEQ ID NO: 787 - DNA, 3771 bp, Kosakonia cowanii
  source 1..3771: mol_type = genomic DNA
atgaccacgacaatcatcaaagggcggaagggtggtggcaccaagacccgcaccccggttgaagccccggacagtattcagtccatagccagagccaaaattcttgtcgcgctcggtgaaggggagttcgccggcgggctggacgggcggagcatttatctcggcgacgcgtcatcgtacaccccgctgcagaatgccgacggcagttacaacttcaacaacgtaaaatatgagttccgctccggcactcaggatcagagctatattcagggatttccgggcgttgagaatgagctgcagatcgcctacgaactcaaagctgccgtgccgtatgtccgctctgtctccaatacccagctttcagccctgcgcatccgcctcggctggccctcgctgctgaaccagaaagacaacggcgataaggtgggtacgcgcgttgagtatgcgatcgacctgtctgtggacggcggcgcatatgacacggtgatcgacggtgcagtcgatgacaagaccaccaccctctatgagcgcagtcaccgtatcgacctgccaaaagccaccaccggctggcagcttcgcgtgcgccgcataacaccggattcgacgacggtgaatgttgtggacagtatgcgggtcgaggcggtcaccgaaataatcgatgcgaagctgcgttatcccaacacggcgttactctacgtagaatttgatgcgaaacagttcccgaacggcattcctcaggtggtgtgcaatccgaaggggcgcattattcgcgtgcctgatacctacgatccggaaacgcgcacctattccggcacctgggaaggcgggtttaaatgggcgtggaccgataacccggcgtggatttattacgacatcgtgctgaatgagcgcttcggcctcggtcagaggattgatgcgacccagattgataaatgggagctgtaccgcatcgcgcagtactgtgatcagctggtgccggatggcaaaggtggcagcggtatggagccgcgctttcgctgcaacgtctacattcaggagcgcaatgacgcctggacggtgctgcgcgacctggccggcatattccgtggcatgacctactggggcgacaacaagctgtatgtgctggccgatatgccccgcgatctctggcacatctataaccatgccagtgtggtcgacggtaaatttaccttcgccgatccgagcgaaaccacgcgcaacactgccgcgctggtgaactggtctgatccggcgaatcactataaagacacgcccgaagtcgtttatgacaacgatctggcgatgcgcttcgattacagccagctcgaaatgactgccattggctgcacccggcagtcagaggctaaccggcgcgggcgctgggcgctgctcacgaacggcatcggtgaggtggtgaccttcagcacgggtatggatgttccccctgtcggtgaggtgatcggcgtggccgcgaacgagctggccggcagggtgattggcggcagggtaagcgcggtcagcggtcgtaatatcacgctcgatcgggccgcggatgtcaaagcaggcaaccggctctttctcaacctgccgtcaggtgtggctcaggcacggaccgtgcaggcggttaacggaaatattgtcacggtcaccaccacctacagtgaaacgcctgaggcggggtgctgctggggtgtggatgctgacgatctgtttatcgcgctctttcgtgttacgggcacccgtgacaacgatgacggcactttcgaggtgaccggcgcgacgtacagcccggatatttacgctgcggttgatactggcgcccggctcgatgaaaggccggtcagcgtgatcccgcccggcgtgcaggcgccgccggaaaatatcctcatcgacagctattcgacggtcagccagaacattgccatcaccaccatgcgcatagcatgggatgccgtaaagggggcaattgcctacgaagccgagtggcggcgcgacagcggtaactgggtgagcgtgccccgcacttcctctcttggtttcgaggtgccgggcatctacgccgggcgttatctggtgcgggtgcgggcggtgaacgccagcgatgtctcttccatatgggcgacatcagctgaggtcacgctcaccgggaaagtgggtaatccgccgaaaccggtaggcttcaccgcctcggaaactgttgtgtttggtatcgagctgaactggggcttcccggcaaacacggacgacacgctgaaaacggagatccagtacagcctgaccggaaccgacgacgatgccatgctgctggccgacgtgccttacccgctgcgtaagtatcagcagatggggctcaaggccgggcaggttttctggtaccgcgcgcagctggtggaccggaccggtaacgaatccggctataccaactgggtacggggccagtccagctccgatgtgaccgatattacagaggccgtgctcgagcagatcaaggataccgacctgtttaaagacctcatcgagaacgccgtggagagcagccaggcggtcgcggatctggctgaggcagtgaagcagaacgccgacggtctggctgcagcggcaggcgcaaaccgccagacggcagaagccattatcggcaatgctctggcgatcgcggatgttgttgtccggcagtcagcccagcagggcgctaactcggcgcggttcgaacagttgcgcgaggttattgccaccgaaaccgaggcgcgcgttacggatgtgatccgcctggaggcgaagacggatcagaacgccgcaggcatcaccgaagtgcgccaggcgctgtcaaacgagagcgaggcccgcgcttcagctgtagacgagctgaccgcgaagacggagaaaaacgcggctaatgtcaccgtgctgaaccagaccgtgacggatctggactcatcgaccgcgtcgcgctttgaggagatatcggcagaaatagcgggcattgatggcagcgatatcagagggggaatacagagcaattccattgcactgatcaccaacacgctggcgcaggtcaacacccgcaacctgctcagcgtgcagtacggggctaacgccgcaggtatccaacgtgttgacactgttatggcagatgcgagccaggccgttgcggagtcgctcaggacgctggatgccagcgccggtggcggcacggcaaatgccactgattttgcgaagactatggcggacttttcgcaggtctccgctacccgcattaatacgctgtcggtcacggttaatggacagaccagcgcgatctcaactaatgctcaggcagtggcagacatcagcgggaatctgaatgcgatgtacagcatcaaggtgggtgtggatgccaatggccgccagtatgccgcgggtatggggatcggcgtgcagaacaccccggcgggcatgcaggcgcaggtactctttctggcggatcggtttgctgtaatgacacaggcaggcgggacggtgagcctgccgttcgttgtgcagaacgggcagacattcatcaacgaagcctttattaattacgcgtcgatcaccctcgccaaagttggatcgtggtattccgccaattatgtggcaggacagacaggaaccattatgagagcagatggcagttttgagcttaacggtgctgtatctggagaaggagcaatgaagattacgcacgttacgcaaagtgtaaaagatgagaatggagtgcttcgtgttcagatcggaaagttaacaggggcattttaa

SEQ ID NO: 788 - DNA, 759 bp, Kosakonia cowanii
  source 1..759: mol_type = genomic DNA
atgagcatttcatctgatgtccagaagctggagccgggcagccgtgtccgcctcatcgaggttgacggcgaggcgttcggcgccggcattctgcggtttcacaacgaaaccatccctcacacagaggccgagatcattgccgccgacggcgatgcgtcaaagcttccgccgaagtctgtctggtggcaggggctggagtacggtgcgtggccctttgaactaaccggcctgtccgtcagcagcgacgggcagagcgcccgcccgacactgaccgtggcaaatatctccggcacgataggcgcgctctgtcgccgctttcaggggatggctaaggcgaaagtgattatccacgagaccttcgctcattaccttgatgcccgcaacttctccggcggcaatcctgccgctaacccgaatgaggagcgcaaacaggtctattacatcgaccgtaaatccagttcggatgatgaaaccgttgagtttgaactgtccagcccggcagatctgcggggacaactcatccccacgcgtcagatccagcccatgtgcacctggtgcatgcgcggctggtacaaaaccgggaatggctgtacctatgccgggcagaatggctggttcgataaggacggtaacccggtcgatgatccttcaaaggacgtgtgctcaggcctgctgtccaccgggtgtaaaccgcggttcggcgccaacaacgagctcgattatggcggctttccgggcgcgtcacttctgagggggtaa

SEQ ID NO: 789 - DNA, 600 bp, Kosakonia cowanii
  source 1..600: mol_type = genomic DNA
atggaaaagcgaactgtgatcaaactgagcggatcgatggcgcagcgtttcgggcgcacgcaccgccgggcgctgtcctctgccagcgaggttttcagggcgctgtccagcacggtggacggctttgaggattatctccgcgaggcgcgtgccagggggcttgatttcgttatcttccgcgatcgccggaacatcagccaggaagaattttcccttctcggtcccggcgatgagctgcgcattatcccggtcatccgtggcagcaagcgcgccggcattttccaggcggtgctcggggttgccctcattgccgggggtatcgcccttggccctgccggggcagggcttattggtaaaggggttgcgctgaatgttgcgctggttggtgcatcgatggcgctgggcggcgtggttcagttgctgtcgccacaggtggcggggatgaggatgcgtcaggatccggataacaagccttcctatgcattcggcggcccggtcaacaccaccgccagcggcaacccggtgtctctgctttacggccagcgtgaaatcgggggggcaatcatttcagccggcatttacgcagaagatcagcagtaa

SEQ ID NO: 790 - DNA, 759 bp, Kosakonia cowanii
  source 1..759: mol_type = genomic DNA
atgaacctcgaatcattacctaaattttattccccgaaatcaccgaagcttaacgatcagacgccagcgaccggcggagtcgcgctgactatcaccgatgtaatggcagcacagggcatggtgcagtcgaaagccagtctcggttttaatctcttcctggcgaaaatggggattcaggatccggcacctgctattgatgggctgatgcaatacgcgctggcgctgaaaaacccggttctggggaaactgagtgagaaggcacgcggcgaagttctgccggtgctggtgcaatttgcctatgcagattattcgcgttctgcagccagtaaatcgacctgcccacattgcgaagggaaaggcgtggtgcgggaaatgcaggacgtggttaaacaccctggcgttaacggcgtagaggcaacggttaagcacgaagccgtagaagtgatgtgccagcactgcacgggaaaaggagatgtgggcacggcctgccgcggctgtaaaggtaaggggaccgtgctggatgagaagagaaccaatctcctcggcgcaccagtcaggaaagtttgcggtcgttgcaacggaaaccgcttcagccgtttgcctacaacacttgcgcgggtgcgcatagagaagattatccctgatctgaccagctaccagtggtacagcggttatggcgatgtaatcgcgcttttggtgacaaaatgctggcaagaagaggcttttgccgaggtgcagctgcgcaaagttacaagatag

SEQ ID NO: 791 - DNA, 621 bp, Kosakonia cowanii
  source 1..621: mol_type = genomic DNA
atgaaagagaaatttatcgagtggtttacagcgggaaacagcggctatacacctgcaattgatgctgatgggaaattcgaaaaagagaaaacccagcacatgtgggaggcatatcaggcaggtttagcgagcgcagagtcgcaggttaagcagctggctgcggagaatgcggcgcttaaggatgaggtgcctatgggtgcgattgagaatggacgtgcgtttgcagagcgattagaggcgtacccgtttgaatgtcagggtggaaatctcaatatgtgcagtgactggcaagaactccgccgctgcttcgagcacctttccgaatgggcgatgcacagccaggcaggaacaccagcgaccgacgccatcctcgcctccctgcgcgcagaaggggtggagatgcttcttacagagaatttcaaagccgaaatagcaggcactttggctgattttgatggtgtcgatgatgccactctgcaaacggtaatctggagcggacagccaccggagccagatggtgatgtgtggcacatcgaatatatgactcgcggctaccaggttcagaaaaaaatccgcgaattcgccgcccagctccgcagcaaatcggaggtgcagtcgtga

SEQ ID NO: 792 - DNA, 426 bp, Kosakonia cowanii
  source 1..426: mol_type = genomic DNA
atgaaattcactgacatccgggaagacagattgtttgtcatacaggagaaaacagggaataaattagccatccctttagacctgaaactggaagcggccgatcttcatttaaaagaagtgatagaacgttgcagagtgaacaatccatctgagttcctgctttactcgccggtgcgtcggggtggaagaaagcccggaccactgacgccggacgggttaacccaggcattctcagatacccgtgatgtcactgtgcttaaatttggcccttacccgccgtcatttcacgaaattagaagtctggccagtaggctttatgagaaggaaaaaggcgaagaatttgcgcagcggcttttgggccataaaaatttatcaatgaccaaaaaatacttggactcccgtggggctgagtatgttagggtttag

SEQ ID NO: 793 - DNA, 210 bp, Kosakonia cowanii
  source 1..210: mol_type = genomic DNA
atggagtcaggctgcgccagcaacacgccgccgctttgctataacgaggcggtggtgatgaaaaacagggtgtcggttccggtgttcggaataagaaaatcggtcaggaccaccgaatatctctccggcggcagcttcggttatcagtggattgagcggagcgttattacagatacctcgtccttcgacaggctgctggtgacggagtga

SEQ ID NO: 794 - DNA, 510 bp, Kosakonia cowanii
  source 1..510: mol_type = genomic DNA
atggcaaagctcacagacaaacaagagctgtttgcccgtgagttcattaaagacctcaacgccactcaggcggccatcagggcgggctacagcgagaagacggcccgggccattggttgcgagaaccttacaaagcctgacatccagctgcgtatcgcagaactcaatcaggagcggatggagcgcgttcaaatcgacgccgattacgtcctgcgtcaggcagtaaagctccatgagcgttgcatgcaggaagtggaacctatcactgatcgtcgtggcgaagaggttacggacgagcagggcagaacggtctacggcttcgacgccaagggagcggcagctgcgctcaaacttgttggcgagcacatcaccgttcaggcgtttaagaccaatgtaaaagctgagcacgttggcaaagatggcaaaccgattgaggttgttaactattcccccgccgattacaaggcagcccagtctcagcttgaggggaaactaaaaggcctggactga

SEQ ID NO: 795 - DNA, 606 bp, Kosakonia cowanii
  source 1..606: mol_type = genomic DNA
atgcgtaaaccatcccgccgtaagtgcaaagtatgcggtgaatacttcgtgcctgaattccacgatattcgaatccgctggtgctgcccggagcatggcgcaatcttcgccatggagctgcgcgctaaagagaagttgaaagccgaggcgaagcgcatcaaggctaaacatgaagctgagaaagccgatcgcaaacgcctggcagagaaaaagcagcaggttaagccgctcagttacttcatcaagcaggcgcagcaggctttcaacgagttcattcgttaccgcgaccgtggcgaggcatgcatcagctgtggccgtcaccatgaaggccagtatcacgccggacacttccgcacgactggcgccaaccccgagttgcggttcaacgaagacaactgccatcgccagtgcgccccctgtaataaccatctttccggaaacctgaccgcataccgcccggcgctgatcgccaaaatcggccaggcgcgctttgatgctctgatggggccgcatgaaatgccgaagtggaagcgcgaggactacatccggatccgcgatgagtaccgggcaaagcttaaaacagtgaagcaggaggaagcagcgtga

SEQ ID NO: 796 - DNA, 546 bp, Kosakonia cowanii
  source 1..546: mol_type = genomic DNA
atgcgaatgaatgccaaagagctgatcgccgaagccagagtgacagctcctactctgccaccagcagcagcaaagttaatgacagctatggcagaccgcctcgatgttcagttcgtggcgctgtgcgaatcgcggaacgaggcgaagcagctggctggagagaatgctctgatgaagtcggctattaagactcacagcaagtcagtccacttctgcgtgggttgcggcaaagatgatccatgcagcaatgacgatgtttgctatgtcctcgaagaaactccagccactgatgcattcctcacttccctgcgcgcagaagctcgcaaacagggtgctgtctttgcagcaaacagaatgctggcagcctgggatgctggttttattgaagacacaccagaaaacgcggcagatatcgcccgcgcaattctgatgtctacggaattgatggacgaagcacccgatggtgatttcgatcgtactttctctgatgaaatgcttgaggccatcgccgcccagcttcgcagcaaatcggaggtgccgtcgtga

SEQ ID NO: 797 - DNA, 348 bp, Kosakonia cowanii
  source 1..348: mol_type = genomic DNA
atgaaccttcctgaatctgtcgggccggtgccggttgtccgcacacctgacggctactggtgccaccccgcactgactgcattttaccgtgaccgggactgcgtcccgcaggctgaatatgaccactggctggtcagcaatggcctggaggacaccctggtctgtctggatgccgatgatgacacgccggcggcgcaggcatatgcacgcaacgccgatatttcatactggacgccgcccgtacctgcaggtgagggctggtttaccggcgcgatattcgacagcgaggatgacggtcccgcctgtatctggctgcgccgccgggaggtgccatgcgacgcaggctga

SEQ ID NO: 798 - DNA, 1266 bp, Kosakonia cowanii
  source 1..1266: mol_type = genomic DNA
atgatttacacaactggctctattgcagtcagcggctacacgctgaccggcaccggcacgaatttcaccgcagcaggctccctcattcgtaacggctgcacagtgctggcactgaccagcccggtgcaggctttccagattgcctcaatcgacagcgcgaccggcctcacagtgaccccggcggccatccctgcggttcccgccggcacgaagttcgccatcctgctgagcgacagcctgagcgtggatggcctggcacaggatatctccgaaacgttcagtatgtaccagcggtacatgggcggctttgctgacgtgatgaacagcagcggagatgtgaccatcaccatcaacggtcagcccgttaccgtgcccggtcagaaatcgctggcgaagaagggggctaatgccgacataaccagcctgaacggactgacaacagcgatcacacttgctcagggcggtaccggcgcaaagacggccgcaggagcacgcaccagtctggggctgggaagtatggccacccagagttctgacgcggtaaacataactggtggatccgggacattcaccagccttagctctgacgcggtgaccatcaccggtggaacagcttctcttggcactatcgagacaaaagcgggtgcggagcagccactggtaatacgcaccgctccgagtgggcttggctatatacgtttcagggatgcgtctgaaaatccactggcttatctgggattcggagcgagtggtgcccagcactttattctggcgagcaacatcggagtaaatagcgtcacgctgaatactaccggcgctgtgacagtaaaagcagggggtgctaactacgctttccagacaaacggaaccgctacggggcagctgtggcagagcacatccgatgtcaggatcaagaaggatataaagcccatcaccaatgcgcgtgaggtaatcagtgcaatcagcgggtataccttcaagaagagatacaacctctatgaagtcgccgaaccgctttataccgaagaggcggggatccttgcccaggagcttgagctggtggcgcctgaagcagtctcaaagaatgatttcggcgcccacgacctcgaaaacaatccgattgatgatttacgcgcggtcaactatgcggggatcacaccatacctgatagagctggcgaagctacatgaggcagagattactgatttgaagggagaagtggcacagcttaaggcgctcgtatctgtcatggcgcagggctcttaa

SEQ ID NO: 799 - DNA, 285 bp, Kosakonia cowanii
  source 1..285: mol_type = genomic DNA
atgcgggacaagacaattagcgcaattctggcgcatgcggcgcagtcgttcccggctgaatgctgcggtgtggtgatccagaagggacgggttgagaagtatatcgcctgccggaatctggccacctccccggaggagcagtttgaactgtcaccggatgattatgcagcagctgaagagcagggcacggtggttgccgtggtgcacagccaccccggcgacggctccacgacgcagccgagtgaactcgacatgctgatgtgtgacgcgaccgaagtgccgtag

SEQ ID NO: 800 - DNA, 387 bp, Kosakonia cowanii
  source 1..387: mol_type = genomic DNA
atgccgcgcggcgatcgcccgctgaccgggcgtcagtttgttctcgggcacgctgactgctggtcccttatccgggactattttcgcatcgagcacaatatcgacctgcccgactacagcgttgatcgccactggtgggaggagggcgaaaacctctatatggataactggcacgactgcggattcagggagttcgacggtccccagcagcccggagatatggtcatcatgcaggtgcaggccagcgtgccgaatcatgccggcgtcctgctggaaggcaacatgctgctgcaccacctgtatggtcagctcagtcagcgcattccgtatggcggctattaccgtgatcgcaccattaaggttttacggtacagggacctgatgtaa

SEQ ID NO: 801 - DNA, 336 bp, Kosakonia cowanii
  source 1..336: mol_type = genomic DNA
atggcagagaccttctcctggtgcccgaaggtggcggcgcaggctgataccagtttccgcacccgcaaagcgcagttcggggataattatgctcaggtggccggggacggcatcaacccggtcacatcgcaatggagcgtgagttttaccggcgatgaagcgtatgtccaggtcataaaggcgtttctgaagcggcatgccggctggaagtccttcatctggaagccgcccctggagcccgcagggttatggcggtctgaatctattcagatagccacacacggcgcagatctttacaccctcagcaccacattcattcaggcataccatccatga

SEQ ID NO: 802 - DNA, 3492 bp, Kosakonia cowanii
  source 1..3492: mol_type = genomic DNA
atggcaacgcttcgcgaacttattataaaaatttctgctgactccagctcattccagagtgagatcacccgcgcctctcgcatgggctccaactattacagaacaatgcaggcgggaggccgccaggcggcggctgctgctaaagaaagtgaaagggcgttatctgatctcactaatggttttgcctcagcaggtaaagccgcagctgcggcaactgcggcttttgctacagggaagctggtgcagattgcagacgaatggaactcagtaaatgctcgtcttcaacaggcttctgcttcggctgatgattttgcgacttcacaacgtcagcttatggaaatcagtcagcgcacgggtacagcgttctctgataatgccaacctcttcgcccgcgcagctgcatcgatgcgcgaatacggctatagctcggaagaagtgctcaaaatcaccgaagccgtttcaacagggctcaagctttccggtgccagcacgcaggaatcaagctctgtcattacgcagtttagccaggcactggctcagggcgttttgcgtggcgaagagtttaatgcggtaaacgaatcgggtgatcgtgttatccgtgcccttgccacaggcatgggcgtagcgcgcaaagatctcaaaagtatggccgaccagggaaagctcacgatcgataaagtagtgccagcattaatgagccagctcggggcgttacagggtgagtttgcaacgatgccgcaaactgtttcaggctcattgcaaaaggttactaactcgttcatggggtgggtaggtggtgttaacgctgcaacaggtgccacggatgcgctgtccggtgggcttgatggtgtagcccagacactggattcctttacttcatccgcggtgagcggtgctctgagtgatgtggccgacaatatgtcggttatcactaccgtagcaggcgcgctggtgggcgttggcctggctaagtatctcagcggaattgttaccagcgccacgagtgcgacaggtgctttgatctctgccgcgaaatcagaagttgccctcgctgtagcgcaagacagggcagcccagtcagctgtggcggcttccagagctgacgtctatcgtgcacagcaagctttgcagagagcaaagggcgctgatgttcaggctgctcagcaggaaaaattagcagccgcagaggcaaaggtaacagcagcacaggctaggctcacgacggctcttgccggaggtacagcaacagagaaagtcagggcaagagcagcgcttgagcgtgctcaggcaggtcttgcagctgctaaaaatgcggacgtacaggcagttgctgaacgacgactggcacaggcagaggccgcgcgtgacaggaacctggccaaccgtgtctcgactcaaagtaatttaaacagtgtcactgctgtcggatcgcggctcatgagtagtgctctgggtattatcggtggtattccaggtctggtgatgcttggcgcaggagcatggtatgcggcatatcagaatcaggaacaggctcgccgttctgctcaggaatacggcagaacgatagatgagataagcaaaaagaccagggcgatgtctttgccggaagcttccgacaatagtgaaaaagccaaaaaagctcttgatgaacagaacagacttatcgatgagcaaaaaagcaaaattgaaagtctgaaagagcagattgccggatcgcagtatctaatcaacaaccccggcccgactacgaaaggtggtttcatgatcaaccatcttacctctctgaagactgtaactgatgatctgtcgactgcaactgagcagttgtcggttgaacaggaaagactttctcagatgcaggagaaagcagcctccattcaacaaactctcgagggactccagtaccgtcgggtcttgctgattagagaggaagcggctaatcaaaattctgcctaccagtctctgctgatgatgaacgggcagcatgaaaaatttaaccagttgctcgggctcggcaatcagttactgatggcccggcagggaatgactctggcaccgctgcgtgtacctcaggcagaagcctcgcagaaacagaccgaggcgctcgaaaaaagccgtcgcgagctggccctctcccgcctgaaaggcgaggcaaaagagcgcgcacggcttggctatgctgctgatgagctcggtcttactgctgatccgcaattccagaccaaccggcttgagtacatcaataacgggcttgaagaatggcgcaataacgaggccaacaaaaagcagcccaaagggccaaagacggacgaagaaaaggccgctgatgcttataaaaggatgatcaagcagcagaaggagcagatcgccctgcagggccagagtaccgaactcgcaagggtaaaataccaggtggttgaaggtgaattgtccaccctggacaaggcgcagaaggctgaactgatgcgcaacgctgcgttaatcgatcaggtcaaacttcgcgagcagctgcgtaattacgaggcgaatcttgctgacagcaacgccagcgcccgggcggccaatgatgcgcagctcattggttacggtcagggcacccggttccgtgagcggatgcaggagcagtttaatattcgtaaggagtttgagcagaagaataccgatctgctccggcagcggcaggccggggacattgacgaaaccttctaccagcaggggctggcactcaacaaacgctacctggaagagcgactgcgcgaccaggaggggtattacaccgcttccgatgcgcagcgcggtgactggttaacaggcatgtcagagggctatgcgaactgggtggacgaggcgaccgactattccgcgatggctgccgacgggatgaaacaggcgatgggcggggcagtgaccaccattaccgacatgctcaacggcaatctcgacagctggaaagactggggcatgaacgtgctgaaaattatcgagaccgttctcgttaatatgatggtcgcgaatgccgcgagttctctcggctcactcttcagctttggtgcctcatccgccgcaacggccagcagcgggacggccattcagagtgctgcctcaaactttaccttcaacgccaaaggcaatgtctacgactcaccctccctgagtgcatacagcggtggtgtctaccagaccccgcagctgtttgcgtttgcgaaaggggctggcgtgtttggcgaggcaggcccggaggcgattatgccgctcacgcgcgcggcggatggttcgctcggcgttcgcgcagtcggcgcgccgcagttttccggcggtggcccgtccgtgtcgttcggcgatatcaacatcaacggcggtgcgcagtccacggcaggacagggggctgccgcaactgtcggcaggcaactgaaggatgcaatcgtgaccgtaattaatgagcaggccagcatgcccggatcgccattgtggcggcttttgaaaggagcgtaa

SEQ ID NO: 803 - DNA, 3762 bp, Kosakonia cowanii
  source 1..3762: mol_type = genomic DNA
atgacgaacacagcgattaaagggcggaaggggggcggtaacaaaacccgcacgccggtggaagccccggacagtattcagtccatagccagagccaaaatcctcgtcgcgctcggcgaaggtgaattcgccggcggcctggacgggcgcagtatttatcttggtgacgcgtcctcatataccccgctgcagaatgccgacggcagttacaacttcaacaacgtcaaatacgagtttcgttccggcacccaggatcagacctacattcagggctttcccggcgttgagaatgagctgcaggtcgcctacgagcttaaagctgctgtgccgtatgtccgttccgtctccaatacccagctttcagcactgcgcatccgcctcggctggccctcgctgctgaaccagaaagacaacggcgataaggtgggtacgcgcgttgagtatgcgatcgagctgtcggtcgacggtggtgcatacgcgcccgtggttaaaggcgctgtcgatgacaagaccaccaccctctatgagcgcagtcaccgtatcgacctgccgaaagccaccaccggctggcagctgcgcgtgcgccggattacaccggattcaacgacggtgaatgttgtggacagtatgcgcgttgaggcggtcaccgagatcatcgatgcgaagctgcgttaccccaacacggcgttgctctacattgaattcgatgcgaagcagttcccgaacggcattccgcaggtggtgtgcaatccgaaggggcgcattattcgcgtgcctgatacctacgatccggaaacgcgcagttattccggcacctgggaaggcgggtttaaatgggcatggactgataacccggcgtggatttattacgacatcgtgctgaatgagcgcttcggcctcggtcagaggattgatgcgacccagattgataaatgggagctgtaccgtatcgcgcagtactgcgatcagttggtgccggatggcaaaggtggcagcggtatggagccgcgcttccggtgtaatgtctacatccagaagcgcaatgacgcctggacggtgctgcgcgacctggccggcattttccgtggtatgacctactggggcgacaacaagctgtatgtgctggccgatatgccccgcgatatctggcacatctacaaccacgccagtgtggtcgacggcaagtttacctttgccgatccgagcgaaaccacccgcaacaccgccgcgctggtgaactggtccgatccggcgaatcactacaaagacacaccggaagtggtttatgacaacgatctggcgatgcgcttcgattacagccagctcgaaatgacggctatcggctgtacccgacagtcagaggcaaaccggcgcgggcgctgggcgctgctcacgaatggcatcggtgaggtggtgaccttcagcacgggtatggatgttccccctgtcggggaagtgatcggcgtggccgcgaacgagctggccggcagggtgattggcggcagggtcatcgcggtaagcggtcgtaatatcacgctcgaccgtgccgcagatgtcagggccggtaaccggcttttcctcaacctgccctcgggtgtcgcgcaggcccggaccgtgcaggcagtgaagggcaatgttgtcacggtcaccacggcctacagcgaaacgcctgaggcggagtgctgctggggagtggatgctgacgatctgtttatcgcgctctttcgtgtaaccggcacccgtgacaacgatgacggcactttcgaggtcaccggagcgacgtacagcccggatatttatgctgcggtcgataccggcgcgcggctcgatgaaaggccagtcagtgtcattccgcccggcgtgcaggcaccgccggaaaacatcgtcatcgacagctattcgacggtcagccagaacatagcgatcaccaccatgcgtgttgcctgggattctgttaaaggggcaatcgcctacgaagccgagtggcggcgcgacagcagcaactgggtgagcgtgccccgcacctcctctcagggattcgaggtgccgggtatctacgccgggcgttatctggtgcgggtgcgggcagtgaacgccagcgatgtgtcgtcgatatgggcgacatcagctgaggttacgctcaccgggaaagtgggcaatccgccgaaaccgctgggctttaccgcctccgaaaacgtggtgtttggtatcgagctgaactggggcttcccggcgggcacggacgacacgctgaaaacggagatccagtacagcctgaccggcagtgctgacgatgccatgctgctggccgacgtgccttatccgctgcgcagatatcagcagatgggacttaaggccgggcagattttctggtaccgcgcgcagctggtggaccggaccggtaacgaatccgggtatatcgactgggttcgcggccagtccagcaccgatgtgaccgacattacagaggcggtgctcgcgcagatcaaggataccgaactcttcaaagacctcatcgagaacgccgttgagagcagcaaggcggtcgcggatctggctgaggcagtgaagcagaacgccgacggcctggctgaggcggcaggcgcaaaccgccagacagcagaagccattatcggtaatgccctggcgatcgcggatgttgttgtccgccagtctgcccagcagggcgctaactccgcgacatttgagcagctgcgcgaagttatcgccaccgaaacagaggcacgcgttacggatgtgatccgcctggaggcaaagacggaccagaacgccgccggcatcaccgaagtgcgccaggcgctggcaaacgaaaccgaggctcgggctactgctgtcgatcagcttactgcgcagacggaagagaacaaagccagtgtcacagcgctgacgcagaccgtgacggatctggactcatccactgcctcacgttttgaggagatatcggcagagatcgcgggcatagatggcagtgacatcagagggggaatacagagcaactccatcgcgctgatcaccaccacgctggcgcaggtcaatgatcgcacacggctcagcgtgcagtacggcgacaacaaggcgggaattgaacgtgttgataacgtgatggccgatgccagccaggctgtcgcggagtcgctcaggtcgatggatgccagttccggcgccggcacggcaaacaccaccgactttgcgaaaaccatggctgacttctcgcaggtttcggcgacaaaaatcaactccctgtcagtgacggtaaacggtcagcaggcggcaatcgtccagaatgctcaggtttcggccgatatcaacaacaacctttctgcgatgtacagcatcaaagtgggggtggatgcgaacgggcgccagtacgccgcagggatggggctcggggtacagaatactccgtcgggcatgcagtcgcaggtactctttctggcggatcggttcgccgtaatgacacaggcgggcgggacggtgagcctgccgttcctggtgcagaacgggcagacattcatcaacgaggccttcatcaattacgcgtcgatcaccctcgcacgcgtgggctcctggtattcagcaaattacgtggcggggcagaccgggaccatcatgaaggcggacgggacgtttgaggtcaacggcgcggtatcaggccagggacgcatgcagataacgaataaccgtatcatctcttacgatgcacaaaaccggccggcagccgttatggggcaacgcttataa

SEQ ID NO: 804 - DNA, 759 bp, Kosakonia cowanii
  source 1..759: mol_type = genomic DNA
atgagcatttcatctgatgtccagaaactggagccgggcagccgtgtccgccttatcgaggttgacggcgaggcgttcggcgccggcattctgcggtttcataacgaaaccctccctcacacagaagccgagatcattgctgcgggcggcgatgcgtcgaacctccagccgaaatcggtctggtggcaggggctggagtacggtgcgtggccttttgaactgaccggcctgtccgtcagcagcgacgggcagagcgcccgcccgacactgaccgtggcaaatatcagcggcacgattggcgcgctctgtcgccgctttcagggaatggcaaaggcaaaagtaattattcacgagaccttcgctcattaccttgatgcccgtaactttgctggcggcaatccgggtgctaatccgaatgaggagcgcaaacaggtctattacatcgaccgtaaatccagctcggatgatgaaaccgtggagtttgaactgtccagcccggcagatcttcgtggacagctcatccccacgcggcagatccagcccatgtgcacctggtgcatgcgcgggtggtacaaaaccggcaacggttgtacctatgccgggcagaatggctggttcgataaggacggctaccgggtggatgatccttcgaaggacgtgtgctcaggcctgttgtcgaccgggtgtaaaccccggttcggcgccaacaatgaactcgactacggcggctttccgggtgcgtcacttctgagggggtaa

SEQ ID NO: 805 - DNA, 600 bp, Kosakonia cowanii
  source 1..600: mol_type = genomic DNA
atggaaaaacgaaccgttatcaaactgagcgggtcgatggcgcagcgcttcgggcgcacgcaccgccgggcgctgtcttctgccagcgaggttttcagggcgctgtccagcacggtggacggctttgaggattatctccgcgaggcgcgcgccagggggctcgatttcgttatcttccgcgatcgccgcaacatcagccaggaagagttttcgcttctcggccccggcgatgagctgcgcattattccggtgatccgcggcagcaagcgtgccggcatcttccaggcggtgctcggagttgccctcattgccgggggtatcgcccttggccctgccggggcagggcttattggtaaaggggttgcgctgaatgttgcgctggttggtgcatcgatggcgctgggcggcgtggttcagctgctgtcacctcaagtggcggggatgaggatgcgtcaggatccggataacaagccctcctatgcgttcggcggcccggtcaacaccaccgccagcggaaacccggtacctcttctctacggccagcgggagatcgggggcgctatcatttcagccggcatttacgcggaagatcagcagtaa

SEQ ID NO: 806 - DNA, 759 bp, Kosakonia cowanii
  source 1..759: mol_type = genomic DNA
atgaacctcgaatcattaccgaaattttattccccgaaatcaccgaagcttaacgatcagacgccagcgactggcggtgtcgcgctgagtatcaccgatgtaatggcagcccagggcatggtgcagtcgaaagccagtctcggttttaatctcttcctggcgaaaatggggattcaggatccggcacctgctattaatgggctgatgcaatatgcacatgcgctgaaaaatcccgtgctggggaagctgagtgagaaggcacgcggtgaagttctgccggtgctggtgcagtttgcttacgcagattattcgcgttcggcagccagtaaatcgacctgcccacattgcgaagggaaaggcgtggtgcgggaaatgcaggacgtggttaagcatcctggcgttaatggtgttgaggcaacggttaagcaggaagccgtagaagtgatgtgccagcactgcgcgggtaaaggagagttgtgcacggcctgccgcggctgtaaaggtaaagggaccgtgctggatgagaagagaaccaatctcctcggcgcaccagtcaggaaagtttgcggtcgttgcaacggaaaccgctttagccgtttgcctacaacacttgcgcgggcgcgcatagagaagattatccctgatctgaccagctaccagtggtacagcggttatggcgatgtaatcgcgctactggtgacaaaatgctggcaggaagaggcttttgccgaggtgcagctgcgcaaagtcacaagatag

SEQ ID NO: 807 - DNA, 1128 bp, Kosakonia cowanii
  source 1..1128: mol_type = genomic DNA
atggctgcaagacctcgtaaaaataatgtaagcgtcccgaatctatatcctctgtatagccggaaggtcaataaggtctactggcgttataagcaccctatcacgggaaaatttcatgccctcggtactgacgaagcagaggctattgcaattgctaccgaggcgaatactcgcctggctgaacaacgctctcgccagatcatggcgattagcgacaaaatcgcgaccagcaaaggaaaggctataactacgaacacctggcttgaccgttactggaaaattcaaggtgaaaggctggatagtggcgatattaagctgaacacctataagcaaaaagccaaaccagtcgctttgctgcgtgaccgggttggtatgaagatgatttcgtcggttgatgtgcgagatatcgctgaagtactggaagcctacatttccgatggacaaccgagaatggcgcaggtgatacgctcagttttaatcgatgtgtttaaagaagctcaacattttggggaggttcctcctgggtacaaccctgcccttgcgacaaagcagcctcgcagacgtataacgcggcaacgtctaaatctggaggaatggcataaaattttcgatatagccgatgctaaccagaagtatatgggtaacgctatgttgttggctcttgtgaccggtcaacgtctgggggatatttcaaacatgaaattcagcgatatttgggacgaccatctccatatcgaacaggagaaaaccgggagcaagatcgctattcccctctcgctgaggttaaatgcaatcaactggagcttgcgtgaagtagttgcgcgatgcagggattatgcagttagcccatatctggtgcatttcttccgggcgacctcgcaggctgaacgtggggctcaagtaaaatctaacacaataacaatgaatttcagtaaagcacgcaatgaggcggggattgattgggggggcggtacgccagcaacatttcatgaacaacgctccttagcagaacgtctttatgaggcccaaggtgtggatacgcaaagattacttggccataagtccccaaatcagaccgccagatatcatgatgatagaggaaaagactggaataaggtaataatttga

SEQ ID NO: 808 - DNA, 252 bp, Kosakonia cowanii
  source 1..252: mol_type = genomic DNA
atgaaaatgattaacgctgcggcggttgtgctggtttcgttaatggcatcaggttgcgccagcaacacgcccccgcagtgctataacgaggctgtggtgatgaaaaaccgggtgtcggttccggtattcggcataagaaaaccggtcagcaccaccgaatatctctccggcggcagcttcggttatcagtggattgagcggagtgcttttacagacacctcggcctgcgacaggctgccggtgactgagtga

SEQ ID NO: 809 - DNA, 954 bp, Kosakonia cowanii
  source 1..954: mol_type = genomic DNA
atgcagatgtttattgcagggaccagctttgacgccatcaacgccatggcggccagttatgttctggatgtcatcaccattaacggcacagggagcaagacctactccctttccggtgtgtcgctgacatatgccattgtgaatgattttatgggagggcagttaacgggcgcgacctacagcgtcagtgtcagcggattaaccgtgtcgtggaacgtcaataatgccgtgacccttattgtgtacggcagcccggtagcgggcacgcagagtgactacttcggcttccagctgttccagtacataaacggggcgaggacggtcaagctggccccgaattatgtgccgctgtgcctgcgccagattatagatgtgccggccggcgcgcgaactgtgcagacgcaggttccggcgggcaacccggtaatgtgttttcaccgtcacaccggcgaggcgatggatttgtgctggtggaagcccgtcacggccagcgggtatcacgcactgcagttccccactgcggcaagtaaccagaccgggtgccgggtgtatgtattttcgaatattctcgcgaatatcccggactatggcttctttctctaccgggccggacagatggtctggcacagcaactgcctcccgctgcaggtcattcctctgactaacggggatatcaccagcgccacgccgctggcggtgtcatcgagtgtcacatcacatatcttcgtgcctcaggacccggcatatccgacgggatacagcaatttcatgtgtgcatcagcgggaaaatacggggctgcatataaagtgcaggtcgggaaagtattccagagcacctatatcagcaaccccgatgaaggaaggaggatgagagggtgggcatgcggcggtgtcgggtatatcgacacccggttctatgaccagtactacaaaaatgcgctgggcatcacctga

SEQ ID NO: 810 - DNA, 615 bp, Kosakonia cowanii
  source 1..615: mol_type = genomic DNA
atgactaaacagataaacgatacccccacgcgggggccttccgaccatagtgtccgtgatcaggttgttgacgcagccactgagcatttcggccactacggctacgaaaaaaccacggtctccgatctcgccaaagcgatcggtttttcaaaggcttatatctataagttttttgattctaaacaggcaatcggcgaagttatctgctcaaaccggctggcgatgatcatggaaattgttaatgctgcgattgcggatgcgccgacagctgctgagaaaattcggcgattattcagagcattgtcagaatccggtagcgatttgttttttcgtgaccgtaagttgtacgacatcgcggccgttgcggcacgtgataactggccttcagcgcaagcgcatgagcaacgtctgcgtcagcttattgaacagattattgttgaagggcgtgaggctggtgagtttgaaaggaaaactccccttgacgagactgctgatgcgatttttatggtcatgcggccttatatcagcccggtgcagctgcaatataatctggaaactgccccggccgcagccgcattactgccctccctgatcctgagaagtttgtccccttga

SEQ ID NO: 811 - DNA, 1110 bp, Kosakonia cowanii
  source 1..1110: mol_type = genomic DNA
atgctcaggcttaaacctgtcacttttgctgtttgcctgctgccgtttgcacttgtggcctgcggcgacgcttcagataacagtgatccccgcagtcagccacccctggtcaggtctgccgcagcgatcaacgcaaccgattcttcccgcgcttttacgggggtggtggttgcacgtatccagagtgaccttggtttcagggtacacggcaaaatcctggaacgtctcgttgataccggtcaggccgtgaaacgaggccagccgttaatgcgtctggaccccgtggatctgagcctgcaggctcaggctcagcaacaggctgtcgctgcagcaaaagcacgcgcccgacagacagcagacgacgaatcgcgatatcgcggtctggtcactaccggagctgtatcggcatccgcttacgatcagattaaagccgcggcagatacggccagggctgatctcagtgccgcccaggcgcaggcgaatgtggcgcaaaacgccatgagctacgcagtcctggtggccgatgatgacggtgtggttatggatacgctggccgaacccggtcaggtgatcagtgccggacaaccggttatcaggcttgccagagccggtcagcgcgaagcggtcgtgcagttgcctgagacgctgcgtccgtccgtaggaagcaaggcacaggcttctctgtacggcagcgataaacagcccgtttccgcgacactgcggttactctcggatgccgccgatccgttgacgcgcactttcgaggcacggtatgtgctgaacggcccgttgtctggtgcccccctggggtccactgtcaccattcatattgcgcagggcagaacatcgcagtcgttgctgcaggtgcctttagccgccgtttttgatgcgggtaaaggcccgggtgtctggagcatttctggaaaccccgccagagtggcatggcgtccagtacaggtcgtcagcctcggggatgatgcggcaagcgtgaccggcagccttaagcctggcgaacaggtcgtggcgctgggggctcatctgctgcatgacggtgagacagtccggctggcgaagcagagcgatgtcagtgtcgccgggagccagccatga

SEQ ID NO: 812 - DNA, 3111 bp, Kosakonia cowanii
  source 1..3111: mol_type = genomic DNA
atgagtagtggacgtttcaatctttccgcgctcgctgtgcgtgagcgttcagttacgctgtttcttatcctgttaatcaccgttgccggcattctctcgttccttggactggggcgcgcagaagacccaccctttacggttaagcagatgaccatcatttccgcctggcccggagccacagctcaggaaatgcaggaccaggtggccgaaccactggagaagcgtctccaggaactcaagtggtatgaccgcaccgagacctacacgcgccccggtctggcttttaccatgctctcgttgcaggacagtactccaccttcagaggtccaggaagagttctatcaggcacgtaaaaaactcagcgatgaagcaaggaacctcccagccggggtaattggtccgatggtcaacgatgagttctcggatgtcacgtttgcactctttgcgctgaaagcaaaaggagagccacagcggctactggttcgtgatgccgagtcattacgccagcgcttattgcatgtacccggggtgaaaaaggtcaatattatcggcgagcaggccgagcggatttttgtctcattttctcatgaccgtctggcaacactgggtatctcaccgcaggatatctttgcagccctgaacaaccagaacgtgctgacgcctgccggttcaatagacactcgtggtccgcaggtttttatccgtctggatggggcgtttgacaagctggagaaaattcgtgaaacgcctgttgtatcacagggaaggacgctgaagctttctgatgtcgcgacagttgagcgtggctacgaagatccggcgacttttatggtgcgtaaccagagtgagcctgccttgttgctgggtattgtgatgcgtgagggctggaatggtctggatctgggtaaagcgctggataagcaagccgccagcatcaatgcggatatgcctctcggcatgacctttacgaaagtcaccgatcagtccgttaacatcagctccgccgttaatgagttcatgatcaagttttttgtggcgctgctggtcgtgatggtggtctgctttctcagcatgggctggcgcgtgggcgtggttgtcgctgcggctgtgccactgacactggctgtcgtctttgtgatcatggaagcgtcaggtaaaaacttcgaccgtattaccctgggttcgcttatcctcgcgctgggattactggtggatgatgcgatcattgccattgaaatgatggtggtgaagatggaagagggttacgaccgaataaaagcctcggcgtatgcctggagccacaccgccgcgcctatgctggccggtacgctggtcacggccgtcggctttatgcccaacggttttgcacaatccacggcgggtgaatacaccagcaatatgttctggattgtgggaattgccttaatcgcctcctgggttgtggcagtggtctttacgccgtatctcggggtgaaaatgctgccagctatcaaaacggttgaagggggacatgatgctatctacaacacccgacgctacaaccgttttcgtcagttactgacgcgggtgatcgcacgaaaatggctggtcgcgggttcagtcgtcgcggtgttcaccgttgccgttctcggcatggcactggtgaaaaaacagttttttccgacatctgatcgaccagaagttcttgtggaagtgcagatgccgtacggcacctctattgaacaaaccagcgccgccgtaacgaaaattgaggactggctcaggcaccagaaagaggcaaaaatcgtgacggcttatatcgggcagggttcaccacgtttctacctcgccatggcgccggaactgcccgatccctcttttgcgaaaattgttgtcctgaccgacagccaggaagcccgtgaggcgctcaagtttcgtcttcgccaggctgcggctgacgggctggcaccggaggcacgtgttcgcgtgacccagctggtatttggcccgtattcaccctatccggttgcctttcgtgtgacagggccggatccgacggttttacgggacattgcagataaggtaaaaacgctgatgcaggccagtccgttgatgagaacggtcaacacggactggggatcacgcgtgccgacactgcatttcaccctgaatcaggatcggctgcaggcggtggggctgacgtcaaacgcggtggcccagcagcttcagttcctgctttcgggcgttccggtcaccgctgtacgtgaagatatccgttcagtgcaggtcatgggacgtgctgccggcgatatcaggcttgatccagcgaaaatagctgactttaccctggtcggttccgcagggcagcgtatccccttatcgcaggctggcgaggtcgaagtgcgcatggaagatcctgttctgcgccgtcgtgatcggatgccaaccattaccgttcggggtgatattgctgaatccaagcagccgccggatgtctccactgcaattatgaagcaactgcagcccatcatcacaacgcttccggatggataccgtattgatgaagctggctcgattgaggagtcagggaaagccaccaaagcgatggtacccttattcccaatcatgatagccatgacgctgctgattattatcctccaggtgcgctcaatgtcggcgatggtgatggtctttatgaccgcaccgcttgggctggtgggggtggtgccgaccttactgctcttcaaccagccctttggcatcaatgcgctggttggcctgattgctctgtcagggattttgatgcgtaacacgctgatcctgatcggccagattcaccataacgagcaggaaggacttgcaccctttcatgcggtcattgaggctacggtacaacgctccagacccgtactgctcacggcgatggcggccattctggcctttatcccgttaacacattcggtgttctggggaacccttgcctacaccctgataggcgggacactgggtgggaccattattacgctggtattcctgcctgctatgtatgccatctggttccggatcaagaggccggattcaaactcgtcaacggaaaaacattccagctcagaaggattaaaaaatgtctga

SEQ ID NO: 813 - DNA, 1467 bp, Kosakonia cowanii
  source 1..1467: mol_type = genomic DNA
atgtttcccctaaacacgcttgcagtggttgtgggtgcctgcatcctgacgggttgtaccgtcggaccggactattatcgtcctgaggtacccattgcgaagcattaccacgctcaacaggctttacagcagcccactacatccgaatccgccagtttttcaatctggtgggagaactttggcgatccgctgttaagtcggttcgtttcagatgcacttacgcaaaatcttgacctcgcccaggcatccgccaggatgatgcaggcacaagccgggctgggagcggcaacggcggcgctgcttccctcgggaaatatcagcgggcaagctgcacgtgcgtatcagtcggttgaaacaccgttgggtcaggtgcttagttcaacgccggattataatcgctacggcaattcgtatgaaatggatctcaatgcaggttgggagatagacctgtttggtggcctgagacgaggtcgtcaggctgccctggccgattatcaggcttctcaggccggtgtagcggcgacacgcctcgctgtcgcagcacagactgcagatatctatatcaccctgcgtggattacagtctcgtctggatattgcgaataaacaggtcattacacaacagcaactgctggaaaaagttcagctattgcacagcaaagggctggcatcagaatatcaggttcgccagacagaaggcgcactggcacaggtgaaggcaacggtaccggttctgaacaacggacttgatgccgccattaatgcgctggacgtcatgctgggcgcgcctccggggacgcatcatgcgcaactggcttcaccgggggctattcctcatacacccgcaatcgccgcaatgggcaccccggcggacctgcttcgccgcaggcccgatattattgtggccgagcgtcacctggccgcatcaagcgcccgtatcggtgtggctgtcagcgagtattatccaaagttttcccttaatgctctgcttggcagcgcaacggcagtatcaggcgataatcttttcattgccggtgccagccagtcggcaggtgtgctggggttacgctggcggctttttgactttggtcgtattaacgcccagataaagcaggcaacaggccaggaagctgaggctctcgcggcttatcgtctgtcagtcttacgcgcaacagaagatgtagaaaacgccttctcggcactggtcaatcgccagacgcaggctgccacactgaccagcggtgaaaccgccctggccagcgcgcgacagtcttcttttttcgcttttcagcaaggtacagccagtctgattgacgtactgcataacgatgaaacgcttctccaggcctcggatgcaagagcgcaggcgcagacagaatctgcccgcgcagccgtggcagcattcagggcgctgggcggtggctggcaatctacattgtctggagaaatggcaaatacgccgggataa

SEQ ID NO: 814 - DNA, 489 bp, Kosakonia cowanii
  source 1..489: mol_type = genomic DNA
atgacacgaattggcattcttggagtaaatgatctgactgaaaccattctggtcgaattgttccgtcttgatccttgcgctcatgtttttctttcatccggcgagcatgagcgcgcaaacctgctggcaaggaagtttccgtgctggattcaggatgacgttcaggcggtaattaacgaagcagatatcattatcattacgacaggaacatcttcctctgaaaacccaccggaaaaaattgagtaccgaaaatcacaattaatcttttttttggaagcatggccatcaataaacagtcaggtgttttctccccatacggataaaaaaataaattttacaaccagacatgtagcactggctaatatttcaccattcattcatctaacagaagtacagattgatgactatctttttattcttaaagtcctgttggttgcaatgaaacccgtgcatacacttgatgtcaatttcagatcgtcttctgaataa

SEQ ID NO: 815 - DNA, 177 bp, Kosakonia cowanii
  source 1..177: mol_type = genomic DNA
atgaacaggaaagcgtttataaatgattttatatcatggataaataataacattgagtcacatctgaaaattgatgatgtcgccataaagtccggttgttcgaaatggcgcttacaaaggctgtttttagcggagaccgggcaggttcttggtcagttcatcagagaaaaaagttag

SEQ ID NO: 816 - DNA, 204 bp, Kosakonia cowanii
  source 1..204: mol_type = genomic DNA
atgactcctgtttacgatctggttcgccgggccgacggcaaaaacgttttcagtttcccggccggcggccgctatctggtggacacttcaaatggccttcagtcgatgcgcccccttatggacgacgagatcatttttacggtggagagtgccgcgcactttctgaagaaaattggttatcaggtaattccgccagcggcgtga

SEQ ID NO: 817 - DNA, 201 bp, Kosakonia cowanii
  source 1..201: mol_type = genomic DNA
atgacatttttcattgtctgggaagcatacacacgtgactggcagctgatgcagaagggctcacgcttcatgagcactgacgatgctgacataatcgatgttgatctggctgactatgtggcagaaatggccaaagcgcttggtattgaggaaaagtacttcgtcattacctcggtacagcaaatatgcgtgctgaaataa

SEQ ID NO: 818 - DNA, 492 bp, Kosakonia cowanii
  source 1..492: mol_type = genomic DNA
gtggagttttgcagcacaagtaacaccacgagggctgcagacggggcaatcaaggctgcttcgtctatctttcgcattgtgaaaagcaaagaggactgtacgcgtcctgatatcgatgaggcagacttcgcgtggttcgtcgcagtagtggcgaatgccgaaacagagggcgttagtgtgactcatgaagcgacgggtgtgcaccttcttaaaggctctgcaggtttggctaagtccgggtggcaaatgtctcttcctcgtgacccacagggttccggtgacatgggcatcgtggaagcggagcaggaagaaggtagctcgctcatcattaggctctataagcggcgctatgttctttccgaagacagggatatcgaactgcaaaaaggcgcagcgatcgacgtccctacgacgagttggatcgatgtccgtctggatatgcaggaaaatagtacctggaatcaccgcgttgagagcgcacaggaagaataa

SEQ ID NO: 819 - DNA, 603 bp, Kosakonia cowanii
  source 1..603: mol_type = genomic DNA
atgaatatccccccattacgcggcccgtcggatcactcagttcgcgatcaggttgttgaggcagccaccgagcacttcagccactttggttacgaaaaaaccaccgtttccgacctcgcgaaagcgataggtttctccaaagcctatatctataaatttttcgattccaagcaggcgataggcgaagtgatatgcgcgaaccgcctggcgatgatgatgaatatcgttaacgccgctattgcggatgcgccgagcgcttctgaacagcttcgccggctgttcaaagccgtggtggaagcaggcagcgatctcttctttcacgatcgcaagctgtacgacattgctgccgttgccgcgcgtgacaaatggccctccgcgcaggcgcacgagcagcgtctgcgccagcttattgaggagatcatcaaagcgggacgcgaggcgggagaatttgagcgtaaaacgcctcttgatgaagccgcggatgccatctacctggtaatgcatccctatgtcagccccgttcagttgcagtacaacctggagacggcaccgactgccgctgttttcctctcttcgctgatcctgaggagccttgcgccctga

SEQ ID NO: 820 - DNA, 1110 bp, Kosakonia cowanii
  source 1..1110: mol_type = genomic DNA
atgctcaggcccaatcctgcctctttagctatttgcttcttgccgctggcgattgtcgcctgcggtgacaatggcaacagcgacgatccccgtacccagccgccgctggtgagaactgcccctgtcatgagtgcggtcgataacgcccgcgcgtttacgggtaccgtcgtggcaagaattcaaagcgaccttggttttcgtgtgccgggcaaagttcttgagcgccttgtcgataccggccagacggtcacgcgcggccagccgttgatgcgcctcgacccggccgacttaagcctgcaggcggtcagcgctgcccaggcggtaagtgcagcccaggcccgggtcagacaggcggcaagtgatgaagcgcgctaccgcagccttgttaccacgggcgcggtgtcggcctctgcctacgatcagatcaaagcggcggcagacacggcgcgggccgatctgaaagctgctcaggcgcaggccagcgtggcgcaaaatgcgatgcattatgccgtgctgctggcggatggcgatggggtggtgatggcgacgctggcggagccgggccaggtggtcagcgccgggcaggcggtggtcaggctggcccgttccgggcagcgcgaagcgattgtccagctcccggaaacgttacgtccgtcgctcggcagccgggcgcaggcgacgctgtatggtcgtgctggtcaggctgtcccggcgacgttgcggctgctgtcggaggcggcagatccgctgacgcgcaccttcgaggcgaggtatgtgctgcagggcgcgctggcaagcgcaccgcttggtgccaccgtcacgctcaacattaccgaaggtttgtcaccccggccgttattgcaggtgccgctggctgccgtttatgacgcgggaaaagggccgggtgtctgggaagtgtcaggcaaacccgcccgggtgaactggcagccggtagaggtggtaggcatcaccgatgatgccgcacgcgtgatgggaaatttgcagcccggcgagccagtggtcgcgctgggcgcgcatttattgcatgagggtgaggcggtgcgacaggcgaagcagagcgatagcgaaatcgcagggagtcgcccatga

SEQ ID NO: 821 - DNA, 3087 bp, Kosakonia cowanii
  source 1..3087: mol_type = genomic DNA
atgagcggcggcggttttaacctctcagcgattgccgtgcgcgagcgcgccattacgctgtttctgattatcctcattaccgtcgccgggagcgtctctttcttcaaactggggcgggccgaggatccgccgtttaccgtcaagcagatgaccattatctctgcctggcccggtgcgacagcgcaggagatgcaggatcaggtggcggaaccgctggaaaaacggctgcaggagttgcagtggtatgaccggactgagacctatacgcgtccaggccttgccttcaccatgctctctcttcaggacagtacgccaccttcccaggttcaggaggagttctaccaggcgcgtaaaaaactgggcgatgaagctaaaaacctgcctgccggggtaatcggcccgctggtcaatgacgagttctcggatgtcacgtttgcgctgtttgcgctgaaggccaaaggcgagccgcagcgcctgctggtgagggatgccgagtcgctgcgtcagcggctgctccacgttcccggcatcaaaaaggtcaatattattggcgagcaggcggaacgcatctttatctccttctcccatgaccggctggcgacgctgggcatctccgcgcaggatattttcgccgcgctcaacgaccagaatgtgctgacgccggctggctccatcgatacccgcgggccacaggtctttattcgcctcgacggcgcgtttgatacgctggagaaaatccggcaaacgccgctggtggcgcagggacgaacgctgaagcttgccgatgtcgccacggttgaacgcggttatgaggatccggcaacctttctggtgcgcaatcagggggagcccgcgctgctgctgggtgtggtaatgcgtgagggctggaacggtctggctctgggcgaggcgcttgataaagaggccgccagcatcaatgccggaatgccgcttgggatgtcattgactaaagtgaccgatcagtcagtgaacatcagctccgccgtggatgagttcatgatcaagttctttgtggcgctgctggtggtgatggtggtctgctttcttagcatgggctggcgcgtgggcgtagtcgtggccgccgcggtgccgctgacactggcagtcgtctttgtgatcatggaagcgaccggcaagaacttcgatcgcattacgctcggctcgctgattctggccctcggtttgctggtagatgacgccattatcgccattgagatgatggtggtgaaaatggaggagggctacgaccgcatcaaggcttccgcctatgcctggagccataccgccgcgcccatgctggcgggcacgctggtaacggctatcggctttatgcccaacggttttgcgcactccaccgccggggaatacaccagcaatatgttctggattgtcggcattgcattgattgcctcatgggtcgtggcggtggtctttacgccctacctgggcgtcaaaatgttgcccgcgataaaaccgattgaaggggggcatgcggcgatctacaacacccgtcgctataaccaattccgtgggctgctggcacgtgtgattgccgctaaatggctggtggctggcgcggtggttgttctgtttaccgttgccattctggggatggggctggtgaagaagcagtttttccccacctccgatcgcccggaagtgctggtggaagtgcagatgccttacgccacttccattgcgcaaaccagcgccacaaccgcgaaaattgaggcgtggctcagtcagcagaaagaggcggagattgtcacttcctatattggccagggttcaccgcgcttttatctggcgatggcgccggagctgcccgatccttcgtttgctaaaattgtggttcgcaccggaagccagcaggcgcgcgaagcgcttaagtttcggcttcgtcacgccgtggcggatggtctggcgccggaagcgcgcgttcgcgtaacccaactggtatttggtccctattcaccctatccggtggcctttcgcgtgacggggtctgatccgcaggtgttacgtgacatagcggataaagtgaaaacggtgatgcaggccagcccgatgatgagaacggttaatacggactggggcgcacgggtgccgacgctgcacttaacgcttgatcaggatcgcctgcaggcggtggggctgacctccagcgccgcagcccgccagcttcagtttctgcttaccggcgtgccgattacctcggtgcgggaggatatccgcgccgtggaggtcattggccgcgcggccggggatattcggcttgatccgggtaagatcgccggtttcacgctggtcggctcggctggtcagcgcattccgctgtcgcaggtcggggaggtggaggtgcgcatggaagagccgctgctgcgccgccgcgatcgggtgccaaccataaccgtgcggggtgatattgccgaatccctgcagccgccggatgtctccaccgccattatgcagcaactgcagccactgattgccgcgcttccggacgggtatcagattgagcaggcgggctcgattgaggagtccggcaaagccacgaaagcgatggcaccgctctttccgattatgatcgccatgacgttgctgatcatcattttgcaggtgcgttcactctccgcgatggtgatggtgtttatgaccgcgccgctggggctggtcggcgtggtaccgacgctgctgctcttccatcaaccctttggtatcaatgcgctggtggggctgattgccttgtccgggattttgatgcgtaacacgctgattctgattgggcaaattcaccacaacgagcgggaggggctggcaccattcgacgcggtgattgaagcgacggtacagcgtgcaaggccggtgctgctcacggcgctggcggcgatcctcgcctttatcccgctgacgcattcggtcttctggggaaccctggcctacacgctgatcggtggaacactcgggggcaccattatcacgctggtgttcctgccagcgatgtatgccatctggtatcgcattaaccgccccgatccgcatgaagtgaagagggcagtgggttaa

SEQ ID NO: 822 - DNA, 345 bp, Kosakonia cowanii
  source 1..345: mol_type = genomic DNA
atgctgaagcgcttgtttgagattgatcagatggatgtactcgacatcctccgtgacgatggaacgctaaagccgattacgcagtggcctaaggtctggcacatcacacttcagggaatgaagatttcaacgacaattcaggacttcgacgagaacaccacagagaccattcttaagaagattaaatggtcagacaaggtgaagaacctcgaactgcttggcaagcacataagtgtgcaggcatttaaagaacacgttgagcagaaggtgactgcaactcacaacatcatgccgatcccagcatgcacaagcgttgatgaatgggagaaggcggcgcaacagtag

SEQ ID NO: 823 - DNA, 1467 bp, Kosakonia cowanii
  source 1..1467: mol_type = genomic DNA
atgtttcccctaaacacgcttgcagtggtggtgggtgcctgcatcctgacgggttgtgccgtcggaccggactattatcgtcctgaggtacccattgcgaagcattaccacgctcaacaggctttacagcagcccactacatccgaatccgccagtttttcaatctggtgggaaaactttggcgatccgctgttaagtcggttcgtttcagatgcacttacgcaaaatcttgacctcgcccaggcatccgccaggatgatgcaggcacaagccgggctgggagcggcaacggcggcgctgcttccctcgggaaatatcagcgggcaagctgcacgtacgtatcagtcggttgaaacaccgttgggtcaggtgcttagttcaacgccggattataatcgctacggcaattcgtatgaaatggatctcaatgcaggctgggagatagacctgtttggtggcctgagacgaggtcgtcaggctgccctggccgattatcaggcttctcaggccggtgtagcggcgacacgcctcgctgtcgcagcacagacagcagatatctatatcaccctgcgtggattacagtcccgtctggatattgcgaataaacaggtcattacacaacagcaactgctggaaaaagttcagctgttgtacagcaaagggctggcatcagaatatcaggttcgtcagacagaaggcgcactggcacaggtgaaggcaacggtaccggttctgaacaacggacttgatgccgccataaatgcgctggacgtcatgctgggcgcgcctccggggacgcatcatgcgcaactggcttcaccgggggcaattcctcatgcacccgcaatcaccgcaatgggcacccctgctgacctgcttcgccgcaggcccgatattattgtggccgagcgccatctggccgcatcaagcgcccgtatcggtgtggctgtcagcgagtattatccaaagttttcccttaatgctctgcttggcagcgcaacggcagtgtcaggcgataatcttttcactgccggtgccagccagtcggcaggtgtgctggggttacgctggcggctttttgactttggccgtattaacgcccagataaagcaggcaaagggccaggaagctgaggctctcgcggcttatcgtctgtcagtcttgcgcgcagcagaagacgtagaaaatgcattctcggcactggtcaatcgccagacgcaggcagccacactgacgagcggcgaaaccgccctggccagcgcccgacagtcttctttcgtggcttttcagcaaggtacagccagtctgattgacgtactgcataacgatgaaacgcttctccaggcctcggatgcaagagcgcaggcgcagacagaagctgcccatgcagccgtggcagcattcagggcgctgggcggtggctggcaatctacattgtctgaagaaatagcaaatacgccgggataa

SEQ ID NO: 824 - DNA, 834 bp, Kosakonia cowanii
  source 1..834: mol_type = genomic DNA
atggtaaatatcataaacaaaaaatctttatttattctttcaatgatggcttgcagtacaagttatgctgcttcttttgattgtaatacagtagcttcaggtgttgaaaaaatgatttgctcagatcataagttaagtcgtttggacgactatctatcccagaactataaaatagctatggggcctgatatgcctgaagaagcaaaatctaaaattagaaaatcgcaaatagattggcttaataagagaaatgcttgtactgatgctcaatgcattgaacgaatgtattctaagcagatggattatctttggaacgaatgctttgatcatcttagtggcaaaattgaatatattaaattttccgaagcaatagataagataaagagagatctagcttctcaagaatataataaaactcataagacacctgaggaagttatcagggaattatcaactaagaacactaacaaagtccaacaattaggatttaataataaacagttagattcaattttatttttagatgggtttggtagttactttgaatatcatacattaagagagagtctgtcattgatttatgaacttccagatttaacatcattagagatgatcaattataaaggttatgctggatttaaaataaaaacaacagggagaccttcttctgggtttatttttagagaagaaaatggtgagatttatttaaatggtctcgtatctggcgataaagttattgaggctactactgaaaatgacatgcgagagttagctcgtatttttttgagctatacaggttatgttattgacaataataactccaaagatttatga

SEQ ID NO: 825 - DNA, 588 bp, Kosakonia cowanii
  source 1..588: mol_type = genomic DNA
atgcgaatgaatgccaaagagctgatcgccgacgccagagtgaaagcccctactctgccaccagcagcagcaaagttaatgaccgctatggcagaccgtctcgatctacagttcgtggcgctgtgcgaatcgcgtaatgaagtgaagcagctggctgcggagaatgcggtgctaaagtcgaacctaatgttttgggatgcagaagaccccgaagtgccttattgcagccctgaagatatcgccaatgaaatcatgctcggctacaacgaggaatttgatgttcaggttgcggccaggcttcctaaccgtaaataccgggtatgcaagcttactgagtcggagcgcgagattgaattagtggatggtggcgatattgcaacccccgccaccgacgtcatcctcgactccctgcgcgcagaagcgattagtgacgctctggaaaatagctctgaatatcacgataccgactgcgttatggaccgacatgacatcagttatgaagatgcggaattgcgcgtagctggtgccatggaattgcatgattcgttggttgcagtagcaagcgatctccggaataaggcaggttaa

SEQ ID NO: 826 - DNA, 486 bp, Kosakonia cowanii
  source 1..486: mol_type = genomic DNA
atgcgaatgaatgccaaagagctgatcgccgacgccagagtgacagcccctactctgccactagcagcagcaaagttaatgaccgcaatggcagatcgcctcaatgttcagttcgtggcgctgtgcgaatcgcggaacgaggcgaagcagctggccggggagaatgctctgatgaagtcggctattaagactcacagcgaatcggtccacttctgcgtgggttgtggcaaagatgatccatgcagcaatgacgatgtttgctatgcactggaagaaactccagccactgatgcattcctcgcctccctgcgagcagaagcgataagtgactctctggaaaatagctctgaatatctcgacaccgactgcgttatggaccggcatgacatcagttatcaagacgcagaattgcgcgcagctggtgccttggaattgcatgattcgttggttgcagtagcaagcgatctccggaataaggcaggttaa

SEQ ID NO: 827 - DNA, 1326 bp, Kosakonia cowanii
  source 1..1326: mol_type = genomic DNA
atgatttacacaactggctctatcgcagtcagcggcaacacgctgaccggcaccggcacgaatttcaccgcagcaggttcgctcattcgtaacggctgcacggtgctggcactgaccagcccggcgcaggctttccagatcacctcagtcgacagcgcgaccggcatgacagtgtcgcctgcggcatcgccggcggtccctgcggggacaaaatttgccattctgctgagtgacagccttagcgtggatggcctggcacaggatattgccgagacgttcagtatgtaccagcggtacatgggcggttttgcggatgtgatgaacggcagcggagatgtgaccatcaccattaacggtcagcctgtcaccgttcccggccagaagtcgctggcgaagaagggcgctaacaccgacatcaccagcctgggcggactgacaactgcactgagcatccagcagggcggaaccggggctaaggatgcctcccagggatggctgaatctgctgaacggcagaacaccggcgaccgcgcgaggcgatttacaactgggcacagcagctgtccgtgatacctacagcacaaccggcgccattctttccgtcggcgattttggtattggtggaacgtccggcggcgctatcgtaacgaacgccaacctcattaatgcaaacggcatctggggcgccggcggcagtggcggcctcaactattttgataactattccccgattctgatgatgttccggaccccaaccacaagcggacaactgcaggcgactatcgacggcaaactcgcggtccggggatataacggcagtacgatgagcgcatggaatcagtgctacacaacggggaataccaccagggctgcagacggcacaatcaaggctgcatcgcccatcgtgcgcattgtgaaaagcaaggaagactgtacgcggcctgatattgacgaggcagacttcgggtggtgcggcacgggagtggctaatgccgaagccgggggggttactctgacccgtcaagagacgggtgtatatcttctgaagggctctgccgggctggcaaaatctggctggcaaatgtcgcctcctcgtgatccacagggttctggcgatatgggcatcgtggaagcagagcagggggaggatggaacgctcatcattcgactctataagcgccgttatatcctttccgatgacggtgacatcgaactgcaaaaaggcgtggccatcgacgtaccgccgacgagctggatcgatgtccgcctggatatgccggaaaacagcatctggaatcagcgtgctgagagcgcacaggaagaataa

SEQ ID NO: 828 - DNA, 1446 bp, Kosakonia cowanii
  source 1..1446: mol_type = genomic DNA
atgatttacacaaccggctctatcgcagtcagcggcaacacgctgaccggcacaggcacaaacttcactgccgcaggctctctcattcgtaacggctgcacggtgctggcgctgaccagcccggcgcaggctttccagatcacctcagtcgacagcgcgaccggcctcacagtaaccccggcggccagcccttcggttcccgctggcacaaagtttgccatcctgttgagcgacagcctgagcgtggatggcctggcacaggatattgccgagacgttcagtatgtaccagcggtacatgggcggttttgcggatgtgatgaacggcagcggagatgtgaccattaccattaacggtcagcctgtcaccgttcccggtcagaagtcgctggcgaagaagggcgctaacaccgacatcaccagcctgggcggactgacaactgcactgagcatccagcagggtggtacaggaggtaaaaccgcagcagaagcccgaaataaaattggcgcggcgagttccgggaataacagtgatattaccggtattaccggactgacgactgctctgagtattcagcagggcggtaccggggctaaagatgcctcccagggatggctgaatctgctgaacggcagaacaccggcaagcgcgcgaggcgatttacaactgggtacagctgctgtccgtgatgcctacagcacaaccggtgccattctttccgtcggcgattttggtatcggtggaacgtctggcggcgctatcgtaacgaatgccaacctcattaatgcaaacggcatctggggcgccggcggcggcagtggtcaaaattattttgataactattccccgattctgatgatgttccggaccccaaccacaagcggacaactgcaggcgactatcgacggcaaactcgcggtccggggatataacggcagcacgatgagcgcatggaatcagtgctacaccacggggaatactaccagggccgcagacggcacaatcaaggctgcatcacctatcgtgcgcattgtgaaaagcaaagaagactgtacgcgacctgatattgacgaggcagacttcgagtggtgcggagcaggcgtggcgaatggggaggctgagggcgttactctgacccgtgaagcgacaggtgtataccttctcaagggctctgctggcctggctaagtccgggtggcaaatgtcgcctccgcgcgacccgcaaggttctggcgatatgggcatcgtggaagcagagcaggcggaggatggctcgctcatcattcgactctataagcgccgttatgtgctttccgaagacggtgacatcgaactgcaaaaaggcgtagccatcgacgtaccgccgacaagctggatcgatgtccgcctggatatgccggaaaaaagcatctggaatcagcgcgccgagagcacaaaggaagaataa

SEQ ID NO: 829 - DNA, 711 bp, Kosakonia cowanii
  source 1..711: mol_type = genomic DNA
atgcgggacaagacaattagcgcaattctggcgcatgcggcgcagtcgttcccggctgaatgctgcggtgtggtgatccagaagggacgggttgagaagtatatcgcctgccggaatctggccacctccccggaggagcagtttgaactgtcaccggatgattatgcagcagctgaagagcagggcacggtggttgccgtggtgcacagccaccccggcgacggctccacgacgcagccgagtgaactcgacatgctgatgtgtgacgcgaccgaagtgccgtgggtgatcgcttcatggcctgaaggcgatatccgcaccatcatgccgcgcggcgatcgcccgctgaccgggcgtcagtttgttctcgggcacgctgactgctggtcccttatccgggactattttcgcatcgagcacaatatcgacctgcccgactacagcgttgatcgccactggtgggaggagggcgaaaacctctatatggataactggcacgactgcggattcagggagttcgacggtccccagcagcccggagatatggtcatcatgcaggtgcaggccagcgtgccgaatcatgccggcgtcctgctggaaggcaacatgctgctgcaccacctgtatggtcagctcagtcagcgcattccgtatggcggctattaccgtgatcgcaccattaaggttttaaggtacaaggacctgatgtaa

SEQ ID NO: 830 - DNA, 711 bp, Kosakonia cowanii
  source 1..711: mol_type = genomic DNA
atgcgggacaagacaatcagcgagattctggcgcatgcggcgcaggcgttcccggctgaatgctgcggtgtggtgatccagaagggacgggttgagaagtatatcgcctgccggaatctggccacctccccggaggagcagtttgaactctcgccggaggattacgcggcagccgaagagcagggcacggtggttgccgtggtgcacagccaccccggcgacggtgccacgacgcagccgagcgagctcgacatgctgatgtgcgacgcgaccgaagtgccgtgggtgatcgcttcatggcctgaaggcgatatccgcaccatcatgccgcgcggcgagcgcccgctgaccgggcgtcagtttgttctcgggcatgctgactgctggtcccttatccgggattacttccgcactgaacacggtatcgcgctgcccgactacagcgtcgatcgtcactggtgggaggagggcgaaaacctctatatggataactggtacgcatgcggtttcagggaattcgacggtccatcccggcccggcgatatggtcattatgcaggtgcaggccagcgtgccaaatcatgccggcgtcctgctggagggcaacatgctgctgcaccacctgtatggtcagctcagtcagcgcattccgtatggcggctattaccgtgatcgcaccattaaggttttacggtacaaggacctgatgtaa

SEQ ID NO: 831 - DNA, 339 bp, Kosakonia cowanii
  source 1..339: mol_type = genomic DNA
atggcagttgagaccttctcctggtgcccgaaggtggcggcgcaggctgataccagtttccgcacccgtaaagcgcagttcggggataattatgcacaggtggccggggacggcatcaacccggtcacatcgcaatggagcgtgagttttaccggcgatgaagcgtatgtccaggtcataaaggagtttctgaagcggcatgccggctggaagtccttcatctggaagccgcccctggagcccgcagggttatggcggtctgaatctattcagatagccacacacggcgcagatctttacaccctcagcaccacattcattcaggcataccatccatga

SEQ ID NO: 832 - DNA, 339 bp, Kosakonia cowanii
  source 1..339: mol_type = genomic DNA
atggcagttgagaccttctcctggtgcccgaaggtgtccgcccaggcagatatcagtttccgtacccgtaaagcgcagttcggggataattatgcacaggtgtccggggacggcatcaacccggtcacaccgcagtggagcgtgagttttaccggggatgaagagtatgtccaggccataaaggcgtttctgaagcggcatgccggctggaagtccttcatctggaagccgcccctggagcccgcggggttatggcgatctgaatccctccagatagccacccacggcgcagatctttacaccctcagcaccacattcattcaggcataccatccatga

SEQ ID NO: 833 - DNA, 3492 bp, Kosakonia cowanii
  source 1..3492: mol_type = genomic DNA
atggcaacgcttcgcgaacttattataaaaatttctgctgactccagctcattccagagtgagatcacccgcgcctctcgcatgggctccgactattacagaacaatgcaggcgggaggccgccaggcggcggcggctgctaaagaaagtgaaagggcgttatctgatctcactaatggttttgcctcagcaggtaaagccgcagctgcggcaactgcggcttttgctacagggaagctggtgcagattgcagacgaatggaactcagtaaatgctcgtcttcaacaggcttctgcttcggctgatgattttgcgacttcacaacgtcagcttatggaaatcagtcagcgcacgggtacagcgttctctgataatgccaacctcttcgcccgcgcagctgcatcgatgcgcgaatacggctatagctcggaagaagtgctcaaaatcaccgaagccgtttcaacagggctcaagctttccggtgccagcacgcaggaatcaagctctgtcattacgcagtttagccaggcactggctcagggcgttttgcgtggcgaagagtttaatgcggtaaacgaatcgggtgatcgtgtcatccgtgcccttgccacaggcatgggcgtagcgcgcaaagatctcaaaagtatggccgaccagggaaagctcacgatcgataaagtagtgccagcattaatgagccagctcggggcgttacagggtgagtttgcaacgatgccgcaaactgtttcaggctcattgcaaaaggttactaactcgttcatggggtgggtaggtggtgttaacgctgcaacaggtgccacggatgcgctgtccggtgggcttgatggtgtagcccagacactggactcctttacttcatccgcggtgagcggtgctctgagtgatgtggccgacaatatgtcggttatcactaccgtagcaggcgcgctggtgggcgttggcctggctaagtatctcagcggaattgttaccagcgccacgagtgcgacaggtgctttgatctctgccgcgaaatcagaagttgccctcgcggtagcgcaagacagggcagcccagtcagctgtggcggcttccagagctgacgtctatcgtgcacagcaagctttgcagagagcaaagggcgctgatgttcaggctgctcagcaggaaaaaatagcagccgcagaggcaaaggtaacagcagcacaggctaggctcacgacggctcttgccggaggtacagcaacagagaaagtcagggcaagagcagcgcttgagcgtgctcaggcaggtcttgtagctgctaaaaatgcggacgtacaggcagttgctgaacgacgactggcacaggcagaggccgcgcgtgacaggaacctggccaaccgtgtctcgactcaaagtaatttaaacagtgtcactgctgtcggatcgcggctcatgagtagtgctctgggtattatcggtggtattccaggtctggtgatgcttggcgcaggagcatggtatgcggcatatcagaatcaggaacaggctcgccgttctgctcaggaatacggcagaacgatagatgagataagcaaaaagaccagggcgatgtctttgccggaagcttccgacaatagtgaaaaagccaaaaaagctcttgatgaacagaacagacttatcgatgagcaaaaaagcaaaattgaaagtctgaaagagcagattgccggatcgcagtatctaatcaacaaccccggcccgactacgaaaggtggtttcatgatcaaccaccttacctctctgaagactgtaactgatgatctgtcgactgcaactgagcagttgtcggttgaacaggaaagactttctcagatgcaggagaaagcagcctccattcaacaaactctcgagggactccagtaccgtcgggtcttgctgattagagaggaagcggctaatcaaaattctgcctaccagtctctgctgatgatgaacgggcagcatgaaaaatttaaccagttgctcgggctcggcaatcagttactgatggcccggcagggaatgactctggcaccgctgcgtgtacctcaggcagaagcctcgcagaaacagaccgaggcgctcgaaaaaagccgtcgcgagctggccctctcccgccagaaaggcgaggcaaaagagcgcgcacggcttggctatgctgctgatgagctcggtcttactgctgatccgcaattccagaccaaccggcttgagtacatcaataacgggcttgaagaatggcgcaataacgaggccaacaaaaagcagcccaaagggccaaagacggacgaagaaaaggccgctgatgcttataaaaggatgatcaagcaacagaaggagcagatcgccctgcagggccagagtaccgagcttgccagggtgaaataccaggtggttgaaggcgaactgtccacgctggacaaggcacagaaggctgaactgatgcgcaacgctgccttaatcgatcaggtaaaactgcgtgagcagctgcgtaattacgaggcgaatctggctgacagcaacgccagcgccagggcggcgaatgatgcgcagctcattggttacggtcagggcacccggttccgtgagcggatgcaggagcagtttaatatccgtaaggagtttgagcagaagaataccgatttgctccgacagcggcaggccggggacattgacgaaaccttctaccagcaggggctggcacttaacaaacgctatctggaagagcggctgcgcgaccaggaggggtattacaccgcttccgatgcgcaacgcagtgactggttgacaggcatgtctgagggctatgcgaactgggttgacgaggcaacggactattccgcgatggctgctgacgggatgaagcaggccatgggcggtgcggtgaccaccattaccgacatgctcaacggcaatcttgacagctggaaagactggggcatgaacgtgctgaaaattatcgagaccgttctcgttaatatgatggtcgcgaatgccgcgagttctctcggctcactcttcagctttggtgcttcatctgccgcaacggccagcagcgggacggccatacagagcgctgcgtcaaactttaccttcaacgccaaaggtggcgtctacgactcaccctccctcagtgcctacagcggtggtgtctaccagaccccacagctctttgcctttgcgaaaggggccggggtgtttggcgaagcaggtccggaggcaattatgccgctcacgcgcgcggcggatggttcgctcggcgttcgcgcagtcggcgcgcctcagttttccggcggtggcccgtccgtgtcgtttggcgatatcaacatcaacggcggtgcgcaatccacggcagggcagggagcagccgcaactgccggcaggcaactcaaggatgcaattgtgacggtgattaatgagcaggccagcatgccgggatcacctttgtggcggcttttgaaaggagcgtaa

SEQ ID NO: 834 - DNA, 2028 bp, Kosakonia cowanii
  source 1..2028: mol_type = genomic DNA
atggggcgcgcgcttggcctgataggtggtgttccggggctcgttatgctcggtgcgggagcctggtatgcaatgtatcagtctcaggagcaggcccggcagtcggcacaggaatatgccagaactattgatcaggtgagccaaaaaacgcggtcaatgagcctccctgaagcagatgataaccgacgtaagactgtagaagctctggttgagcaaaaccgccttatagacgagcagggaaaagctgtttcggcagtaaaaagacagattgatgaacttaataaagcacgcggccagccagggataaccaaagacaacgatctgaatatcgtaaaatctttaagcattctcactgatcagctaactgtagaagagaacaagctctatttgatgcgcgagaagtcggccagcatccaacaggtgcttgagggaattgagcgccgccgtaatgactggatccgtgaacaggcctggcgtcagaatgcggcctatcagtccctgctgatgatgaacgggcagcatgaaaaatttaaccagttgctcgggctcggcaatcagttactgatggcccgtcagggaatgacactggcgccgatgcgtgtacctcaggctgaggcctcgcagaaacagactgaagcgctcgaaaaaagccgccgcgagctggccctgtcccgcctgaaaggcgaggcaaaagagcgcgcacggcttggctatgctgctgatgaactcggtctgacggctgatccgcaattccagaccaaccggcttgagtacatcaataacggacttgaagagtggcgcaataacgaggccaacaaaaagcagcccaaagggccaaagacggacgaagaaaaggccgctgatgcttataaaaggatgatcaagcagcagaaggagcagatcgccctgcagggccagagtaccgaacttgccagggttaaataccaggtggttgaaggtgaattgtccaccctggacaaggcgcagaaggctgaactgatgcgcaacgctgcgttaatcgatcaagtcaaactgcgcgagcagctgcgtaattacgaggcgaatctggctgacagcaacgccagcgcccgggcggccaatgatgcgcagctcattggttacggtcagggcacccggttccgtgagcggatgcaggagcagtttaatatccgcaaggagtttgagcagaagaataccgatctgctccggcagcggcaggccggggacattgacgaaaccttctaccagcaggggctggcactcaacaaacgctatctggaagagcgactgcgcgaccaggaggggtattacaccgcttccgatgcgcagcgcggtgactggttgacaggcatgtctgagggctatgcgaactgggtggacgaggcaacggactattccgcgatggctgccgacggcatgaagcaggccatgggcggggcggtgaccaccattaccgacatgctcaacggcaatctcgacagctggaaagactggggcatgaacgtcctgaaaattatcgagaccgttctcgttaatatgatggtcgcgaatgccgcgagctctatcggctcactgttcagctttggcgcctcatccgccgcaacggccagcagcgggacggccattcagagcgccgcgtcaaactttaccttcaatgccaaaggtggcgtctacgactcaccctccctcagtgcatacagcggtggtgtctaccagaccccgcagctgtttgcctttgcgaaaggggccggggtgtttggtgaggccggtccggaggcgattatgccgctcacgcgcgcggcggatggttcgctcggcgttcgcgcagttggcgcgccgcagttttccggcggtggcccgtccgtgtcgtttggcgatatcaacatcaatggcggtgcgcagtccacggcaggacaaggcgctgccgcaactgccggcaggcaactcaaggatgcaatcgtgaccgtaattaatgagcaggccagcatgcccggatcgccattgtggcggcttttaaaaggagcgtaa

SEQ ID NO: 835 - DNA, 2551 bp, Kosakonia cowanii
  source 1..2551: mol_type = genomic DNA
cgatccgagcgaaaccacccgcaacaccgccgcgctggtgaactggtccgatccggcgaatcactacaaagacacaccggaagtggtttatgacaacgatctggcgatgcgcttcgattacagccagctcgaaatgacggctatcggctgcacccgacagtcagaggcaaaccggcgcgggcgctgggcgctgctcacgaatggcatcggtgaggtggtgaccttcagcacgggtatggatgttccccctgtcggggaagtgatcggcgtggccgcgaacgagctggccggcagggtcagcgcggtaagcggtcgtaatatcacgctcgaccgtgccgcagatgtcagggccggtaaccggcttttcctcaacctgccctcgggtgtcgcgcaggcccggaccgtgcaggcagtgaagggcaatgttgtcacggtcaccacggcctacagcgaaacgcctgaggcggagtgctgctggggagtggatgctgacgatctgtttatcgcgctctttcgtgtaaccggcacccgtgacaacgatgacggcactttcgaggtcaccggagcgacgtacagcccggatatttatgctgcggtcgataccggcgcgcggctcgatgaaaggccagtcagcgtcattccgcccggcgtgcaggcaccgccggaaaacatcgtcatcgacagctattcgacggtcagccagaacatagcgatcaccaccatgcgtgttgcctgggattctgttaaaggggcaatcgcctacgaagccgagtggcggcgcgacagcggcaactgggtgagcgtgccccgcacctcctctcagggattcgaggtgccgggtatctacgccgggcgttatctggtgcgggtgcgggcagtgaacgccagcgatgtgtcgtcgatatgggcgacatcagctgaggttacgctcaccgggaaagtgggcaatccgccgaaaccgctgggctttaccgcctccgaaaacgtggtgtttggtatcgagctgaactggggcttcccggcgggcacggacgacacgctgaaaacggagatccagtacagcctgaccggcagtgctgacgatgccatgctgctggccgacgtgccttatccgctgcgcagatatcagcagatgggacttaaggccgggcagattttgtggtaccgcgcgcagctggtggaccggaccggtaacgaatccgggtataccgactgggttcgcggccagtccagcaccgatgtgaccgacattacagaggcggtgctcgcgcagatcaaggataccgaactcttcaaagacctcatcgagaacgccgttgagagcagcaaggcggtcgcggatctggctgaggcagtgaagcagaacgccgacggcctggctgaggcggcaggcgcaaaccgccagacagcagaagccattatcggtaatgccctggcgatcgcggatgttgttgtccgccagtctgcccagcagggcgctaactccgcgaaatttgagcagctgcgcgaagttatcgccaccgaaacagaggcacgcgttacggatgtgatccgcctggaggcaaagacggaccagaacgccgccggcatcaccgaagtgcgccaggcgctggcaaacgaaaccgaggcacgggcgacagctgtcgatcagcttaccgcgcagacggaagagaataaggccagtgtcacagagctgacgcagaccgtgacggatctggactcgtctaccgcctcgcgctttgaggagatttcggcagagatcgcgggcatagacggcagtgacatcagagggggaatacagagcaactccattgcgctgattaccaccacgctggcgcaggttaatgatcgcatacgcctcagcgtgcagtacggcgacaacaaggcgggaattgagcgtgttgataacgtgatggccgatgccagccaggctgtcgcggagtcgctcaggtcgttggatgccagttccggcgccggcacggcaaacaccaccgactttgcgaaaaccatggctgacttctcgcaggtttcggcgacaaaaatcaactccctgtcagtgacggtaaacggtcagcaggcggcaatcgtccagaatgctcaggtttctgccgacatcaacaataacctgaatgcgatgtacagcatcaaggtgggcgttgatgccgctggccgccagtacgctgcaggcatggggatcggtgtgcagaataccccttcgggcatgcagtcgcaggtcatttttctggccgaccgtttcgctgtgatgtcgcaggcaggcggaacggtgagcctgccgttcgttatccagaacgggcagacattcatcaacgaggccttcatcaattacgcgtcgatcaccctcgctcgcgtgggctcctggtattcagcaaattacgtggccgggcagaccgggaccatcatgaaggcggacgggacgtttgaggtcaacggtgcggtatcaggccagggacgcatgcagataacgaataaccgcatcatctcttacgatgcgcaaaaccggccggcagccgttatggggcaacgcttataa

SEQ ID NO: 836 - DNA, 2608 bp, Kosakonia cowanii
  source 1..2608: mol_type = genomic DNA
cgatccgagcgaaaccacccgcaacaccgccgcgctggtgaactggtccgatccggcgaatcactacaaagacacaccggaagtggtttatgacaacgatctggcgatgcgcttcgattacagccagctcgaaatgacggccatcggctgcacccggcagtcagaggcaaaccggcgcgggcgctgggcgctgctcacgaatggcattggtgaggtggtgaccttcagcacgggtatggatgtcccccctgtcggtgaggtgatcggcgtggccgcgaacgagctggccggcagggtgattggcggcagggtaagcgcggtgaacggtcgtaatatcacgctcgaccgtgccgcagatgtcaaagctggtaaccggcttttcctcaacctgccctcgggtgtcgcgcaggcccggaccgtgcaggcagtgaagggcaatgttgtcacggtcaccacggcctacagcgaaccgcctgaggcggagtgctgctggggtgtggatgctgacgatctgtttatcgcgctctttcgcgtaaccggcacccgtaacaacgatgacggcacgtttgaggtgaccggtgcgacctataaccctgatatttatgctgcggtcgataccggcgcccggctcgatgaacggccggtcagcgtcattccgcccggcgtgcaggcaccaccggaaaacatcgttatcgacagctactcgacggtcagccagaacattgcgatcaccaccatgcgtgcggcatggaaacccgtcaaaggggcgattgcctatgaggctgaatggcgccgtgacagcggtaactgggtgagtgtaccccgcacctcctctcagggattcgaggtgccgggtatctacgccgggcgttatctggtgcgggtacgggcagtgaacgccagcgatgtgtcgtcgatatgggcgacatctgccgaggtcacactcaccgggaaagtgggcaatcccccgaaaccgctgggctttaccgcctccgaaaatgtggtgtttggtatcgagctgaactggggattcccgtcgaacacggacgacacgctgaaaacggagatccagtacagcctgaccggtagtgctgacgatgccatgctgctggccgacgtgccttatccgctgcgcaggtatcagcagatgggacttaaggcaggacagattttctggtaccgcgcccagctggtggaccgtaccggcaacgaatccggatataccgactgggttcgcggccagtccagcaccgatgtgacggacattacagaggcagtgctcgagcagatcaaggacaccgacctgtttaaggacctgatcgagaacgccgtggaaagcagcgcgaaggttgcggaactggcagaagccgtgcggcagaatgccgatggtctggctgctgctgccgggtcgaataagcagatggcggaagccattattggcaatgctctggcgatcgcggatgtcgtcgtgcgccagtcagcccagcagggtgctaactccgcgaaattcgagcagctgcgcgaggtgatcgccactgaaaccgaggcgcgcgttacggatgtgatccgcctggaggcaaagacggatcagaacgccgccggcatcaccgaagtgcgccaggcgctggcaaacgaaaccgaggcacgggcgacagcggtcgatcagcttaccgcgcagacggaagagaataaggccagtgtcacagagctgacgcagaccgtgacggatctggactcgtccaccgcctcgcgttttgaggagatttcagcagagatcgcaggcatagatggtagtgacatcagagggggaatccagagcaattccatcgcgctgattaccaccacgctggcgcaggttaacgatcgcacacggctcagcgtgcagtacggcgacaataaggccgggattgagcgtgttgacaacgtgatggctgatgccagccaggctgtcgcggagtcgctcaggtcgatggatgccagttccggcgccggcacggcaaacaccaccgactttgcaaaaaccttggctgacttctcgcaggtttcggccacgaaaatcaattccctcacggtaacggtaaacggtcagcaggcggcaatcgtccagaatgctcaggtttctgccgatatcaacaacaacctttctgcgatgtacagcatcaaggtgggtgtcgatgctaacgggcgccagtacgctgcaggcatggggatcggggtacagaatacgcctgtaggtatgcaggctcaggtgctttttgtggcagatcggttcgccgtaatggcccaggccggaggcacggtctcgctgccgttcgttatcgagaacgggcagacgttcgtcaacgatgccttcttcagggatgccagcattcagttcggtaagatcaccgactcgctgaagtcggataactacgtcgcaggatctgcaggctggaatctgcctaaaagtggcaacgcggagtttaatcaggtgacggtgcgcggcgcgatttatgccaccaacggcaatttcaacctcaccgggccgggcaatacgactgtgattaacgggctgggcgtcacggttaatcttgcaaacggcggtcttataagactggggagctggtaa

SEQ ID NO: 837 - DNA, 759 bp, Kosakonia cowanii
  source 1..759: mol_type = genomic DNA
atgagcatttcatctgatgtccagaaactggagccgggcagccgtgtccgccttatcgaggttgacggcgaggcgttcggcgccggcattctgcggtttcataacgaaaccctccctcacacagaagccgagatcattgctgcgggcggcgatgcgtcgaagctccagccgaaatcggtctggtggcaggggctggagtacggtgcgtggccttttgaactgaccggcctgtccgtcagcagcgacgggcagagcgcccgcccgacactgaccgtggcaaatatcagcggcacgattggcgcgctctgtcgccgctttcagggaatggcaaaggcaaaagtaattattcacgagaccttcgctcattaccttgatgcccgtaactttgctggcggcaatccgggtgctaatccgaatgaggagcgcaaacaggtctattacatcgaccgtaaatccagctcggatgatgaaaccgtggagtttgaactgtccagcccggcagatcttcgtggacagctcatccccacgcggcagatccagcccatgtgcacctggtgcatgcgcgggtggtacaaaaccggcaacggttgtacctatgccgggcagaatggctggttcgataaggacggcaaccgggtggatgatccttcgaaggacgtgtgctcaggcctgttgtcgaccgggtgtaaaccccggttcggcgccaacaatgaactcgactacggcggctttccgggtgcgtcacttctgagggggtaa

SEQ ID NO: 838 - DNA, 759 bp, Kosakonia cowanii
  source 1..759: mol_type = genomic DNA
atgagcatttcatctgatgtccagaagctggagccgggcagccgtgtccgccttatcgaggttgacggcgaggcgttcggcgccggcattctgcggtttcataacgaaaccatccctcacacagaggccgagatcattgctgctggcggcgatgcatcgaagctccagccgaaatcggtctggtggcaggggctggagtacggtgcgtggccctttgaacttaccggcctgtccgtcagcagcgacgggcagagcgcccgcccaacactgaccgtggcaaatatctccggcacgattggtgcgctctgtcgccgctttcaggggatggctaaggcgaaagtgattatccacgagaccttcgctcattaccttgatgcccgcaacttctccggaggcaatcctgccgctaacccgaatgaggagcgcaaacaggtctattacatcgaccgtaaatccagttcggatgatgaaaccgtggagttcgagttgtccagcccggcagatctgcggggacagctcatccccacgaggcagatccagcctatgtgtacctggtgcatgcgcggctggtacaaaaccgggaatggctgcacctacgccgggcagaatggcttcttcgacaaggacggtaacccggtcgacgatccgtcacaggacgtgtgctcaggcctcttgtcgaccgggtgtaaaccccggttcggcgccaacaatgaactcgactacggcggctttccgggtgcgtcacttctgagggggtaa

SEQ ID NO: 839 - DNA, 498 bp, Kosakonia cowanii
  source 1..498: mol_type = genomic DNA
ctgtccagcacggtggacggctttgaggattatctccgcgaggcgcgcgccagggggctcgatttcgttatcttccgcgatcgccgcaacatcagccaggaagagttttcgcttctcggccccggcgatgagctgcgcattattccggtgatccgcggcagcaagcgtgccggcatcttccaggcggtgctcggagttgccctcattgccgggggtatcgcccttggccctgccggggcagggcttattggtaaaggggtcgcgctgaatgttgcgctggttggtgcatcgatggcgctgggcggcgtggttcaactgctgtcacctcaagtggcggggatgaggatgcgtcaggatccggataacaagccctcctatgcgttcggcggcccggtcaacaccaccgccagcggaaacccggtacctcttctctacggccagcgggagatcgggggcgctatcatttcagccggcatttacgcggaagatcagcagtaa

SEQ ID NO: 840 - DNA, 759 bp, Kosakonia cowanii
  source 1..759: mol_type = genomic DNA
atgaacctcgaatcattaccgaaattttattccccgaaatcaccgaagcttaacgatcagacgccagcgaccggcggtgtcgcgctgactatcaccgatgtaatggcagcccagggcatggtgcagtcgaaagccagtctcggttttaatctcttcctggcgaaaatggggattcaggatccggcacctgctattgatgggctgatgcaatatgcgctggcgctgaaaaacccggtgctggggaagctgagtgagaaggtacgcggtgaagttttgccggtgctggtgcagtttgcctatgcagattattcgcgttcggcagccagtaaatcgacctgcccgcattgcgaagggaaaggcgtggtgcgggaaatgcagtacgtggttaagcaccctggagttaatggcgtagaggcaacggttaagcacgaagccgtagaagtgatgtgccagcactgcgcgggcaaaggagaggtgggcacggcatgccgcggctgtaaaggtaagggaaccgtactcgatgagaagagaactaaactcatcggcgcgccagtcaggaaagtctgcagtcgttgcaatggcaaccgctacagccgtttgcctacaacccttgcgcgggcgcgcatagagaagattatccctgatctgaccagctaccagtggtacagcggttatggcgatgtaatagcgctactggtgacaaaatgctggcaggaagaggctttcgccgaggtgcaactgcgaaaagtaacaagatag

SEQ ID NO: 841 - DNA, 252 bp, Kosakonia cowanii
  source 1..252: mol_type = genomic DNA
atgaaaatgattaacgctgcggcggttgcgctggtttcgttaatggcatcaggctgcgccagcaacacgcccccgcagtgctataacgaggctgtggtgatgaaaaaccgtgttgcggtacccgtattcggcataagaaaaccggtcagcaccaccgaatatctctccggtggcagcttcggttatcagtgggttgagcgcagtgcttttacagacacctcctcctgcgacaggctgccggtgattgaataa

SEQ ID NO: 842 - DNA, 954 bp, Kosakonia cowanii
  source 1..954: mol_type = genomic DNA
atgcagatgtttattgcagggaccagctttgacgccatcaactctatggcggcaagctacgtactggatgtcatcaccattaccggcacagggagcaagacctactccctttccggtgtgtcgctgacatatgccattgtgaatgattttatgggagggcagttaacgggcgcgacctacagcgtcagtgtcagcggattaaccgtatcgtggaacgtcaataatgccgtcacccttattgtgtacggcagcccggtagcgggcacgcagagtgactacttcggcttccagctgttccagtacataaacggggcgaggacggtcaagctggccccgaattatgtgccgctgtgcctgcgccagattatagatgtgccggccggcgcgcgaactgtgcagacgcaggttccggcgggcaacccggtaatgtgttttcaccgtcacaccggcgaggcgatggatttgtgctggtggaagcccgtcacggccagcgggtatcacgcactgcagttccccactgcggcaagtaaccagaccgggtgccgggtgtatgtattttcgaatattctcgcgaatatcccggactatggcttctttctctaccgggccggacagatggtctggcacagcaactgcctcccgctgcaggtcattcctctgactaacggggatatcaccagcgccacgccgctggcggtgtcatcgagtgtcacgtcacatattttcgtgcctcaggacccggcatatccgacgggatacagcaatttcatgtgtgcttcagcgggaaaagacggggctacgtataaagtgcaggtcgggaaagtattccagagcacctatatcagcaaccccgatgagggaaggaggatgagagggtgggcatgcggcggtgtcgggtatatcgacacccggttctatgatcagtactacaaaaatgcgctgggcatcccctga

SEQ ID NO: 843 - DNA, 444 bp, Kosakonia cowanii
  source 1..444: mol_type = genomic DNA
ttgagcaccgccttcctcaaaattggcattatcgcgcagatcgacgaggcgaccggataccaatacgtccgagcggaggacgcattacaggttaagttgcgggcgtttgtcgcagaagaattgcgggagtgggagaagacgtttcctgacgatctgtgggagcaatttggtcgcttgacccggtggaaaggtagcctaaaccaacggccaaaatggtgggggcaccttgttctggaattaatatataatgctctcgatccagatatagcgaagtacttgaaagaaaataagcctaaacctgttcatggaaaaaactatcatcagtggatgacgcaggatattggcctaaaagctttaatatctcatatttatgaaattataggaatggcaaagacttgtagcgacatgagagagcttagggataaagttgctctacattacggg

SEQ ID NO: 844 - DNA, 354 bp, Kosakonia cowanii
  source 1..354: mol_type = genomic DNA
atgagtgaatcactgaacaacaaagagctggtcgcggttggccatgagtttgcgaaggcgctgagcagcgacacgccgatcatcgacatcgccaaaatgatgtctcgcctggccgaacggctggactgcacaacggctgcgctgcgcgaaacggtcaaacagcgtgatgcgctggcgtccctgcaccagcaagatatcaccaaggcgctggatgaatgcgctgaatatctcgacagggattgcatcatggaaacgaacggcattagctacgaagttgctgctcaacgacaagcaggtgcaaaggctcttcatgatgcgctgatgggtcatagccgaaaggagcttgctgcatga

SEQ ID NO: 845 - DNA, 546 bp, Kosakonia cowanii
  source 1..546: mol_type = genomic DNA
atgcgaatgaatgccaaagagctgatcgccgacgccagagtgacagcccctactctgccaccagcagaagcaaagttaatgaccgctatggcagaccgtctcgatctacagttcgtagtgctgtgcgaatcgcggaacgaggcaaagcagctggctggagagaatgctctgatgaagtcggctattaaaactcacagcgaatcagtccacttctgcgtgggttgtggcaaagatgatccatgcagcaatgatgatgtttgctatgcactcgaagaaacgccagccactgatgcattcctcgcctccctgcgcgcagaagctcgcaaacagggcgctgtgtttgcagcaaacagaatgctggcagcctgggatgctggttttattgaagacacaccagaaaacgcggcagatatcgcccgagcaattctgaagtctacggaatttatggacgaagcacccgatggtgatttcgatcgttctttcgctgatgaagtgcttgaggccatcgccgcccagctgcgcagcaaatcggaggtgcagtcgtga

SEQ ID NO: 846 - DNA, 507 bp, Kosakonia cowanii
  source 1..507: mol_type = genomic DNA
atgcgaatgaataccaaagagctgatcgccgatgccagagtgacagccgctactctgccaccagcagtagcaaagttaatgacctctatggcagaccgcctcgatgttcagttcgtggcgctgtgcgaatcccggaacgaggtaaagcagctggctggagagaatgctgttatgaagtcggctattaagactcatagcgaatcggtccacttctgcgtaggttgtggaaaagatgatccatgcagcaatgacgatgtttgctatgcactcgaagaaactccagccaccgacgccatcctcgcctccctgcgcgcagaaggggtggatatggcaatggaagcagcgaagccggaagtggctaacgagttccagcgcgagacttttgatcaatgcgtgacagcggctgtgaaataccctcaaagcgatctggctggcaaggttgaaatggtcgcttggcttgaattgttcgccgcccagctccgcagcaaatcggaggtgcagtcgtga

SEQ ID NO: 847 - DNA, 1269 bp, Kosakonia cowanii
  source 1..1269: mol_type = genomic DNA
atgatttacacaactggctccatcgcggtcagcggcaataccctgaccggcaccggcacgaatttcaccgcagcaggctcccttatccgtaacggctgcacggtgctggcactgaccagcccggcgcaggcattccagatcagcgccatcaacggggcgaccagcctcacggtgacgccggcggccagcccggcggtgcccgccggcacgaaattcgccattctgctgagtgatagtctttcggttgacggtctggcgcaggatatcgctgaaactttcaccatgtaccagggctacatgagcggctttgccgatgtcatgaaaggtgtcggcgacgtgacaatcaccatcaacggcgaaccggttaccgtaccgggacaaaaatcgctggtgaagaagggggctaactcggacataacttctctgagcggactcactactgcgctgagtatcgagcagggggggactggcgcaaaggatgctgcaggtgcaagaaaggcgcttcagcttggcggtgcggccacacttgaggttggtactgccgcaggcaccgttgcagcgggaaatgatccacgactgaccactctggatggtaagtcaggtggttccatcactggtcgaatttcgatgcctgccggtgccgtagggacttacctgagtgcatcccagaatgcgggcgtcaggcagcgtgtggtcaacgacacatcagcaacgagcgcagtaggggcgctaacgtggggatataacaacggcagtggttttcagctcgatacaacctggggttcggtgggccttggcgcgtcggcgtggccttacacatttatgatgcagaccgctaatgaaacccagttcggtgcgcgcatctggacgttctctatgtcgagcggcgacattatctgcagtggttcaggtaaccaggcgggtacgtttacttttacgaaagcatcgaactctgaccgggagatcaaacacgatatcgtgtataccgacgggcaggaatcgtacgagaacgttaaaaaatactcacccacatcattcgtctataacgacgatcagcagagcagaaagcgtcgcggggtaattgcacaggatgtgcaggagatcgatccggaatatgtacgcgccatccttaatcctttcacgatgaaaaccagcctttccctcgacactaacgtcatgctgcttgatgtggcactggccctgaaagtggctatctcgaaaatcgaggcgctggaagaaacagttcaacagctgcgctatggatcctga

SEQ ID NO: 848 - DNA, 1269 bp, Kosakonia cowanii
  source 1..1269: mol_type = genomic DNA
atgatttacacaactggctccatcgcggtcagcggcaataccctgaccggcaccggcacgaatttcaccgcagcaggctcccttatccgtaacggctccacggtgctggcactgaccagcccggcgcaggcattccagataaccgccatcaacggggcgaccagcctcacggtgactccggcggccagcccggcggtgcccgccggcacgaagttcgccattctgctgagtgacagcctttcggttgacggcctggcgcaggatattgcggagaccttcaccatgtaccagcgctacatgggcggctttgctgacgttatgaaaggtaccggcgacgtgacaatcaccatcaacggtgaaccggttaccgtgccgggacaaaaatcgctggtgaagaagggtgctaacagcgatatcacttccctgagtggtctcactaccgcgctgagtattgagcaggggggcactggcgcgaatgatgcttcaggtgcaagaaaggcgcttcagcttggcggtgctgccacacttgaggttggtactgccgcaggcaccgttgcagcgggaaatgatccacgactggccactctggatggtaagtcaggaggttccatctctggtcgaatctcgatgccttccggggcagtgggaacgtacctcagtgcagcccagaatgcgggtgtcaggcagcgtgtcgttaatgatgcgagcgcgacgagcgcggtaggggcgctgacgtgggggtataacaacggtagtggttttcagctcgatacaacctggggttcagtgggccttggcgcgtcggcgtggccttacacatttatgatgcagaccgctaatgagaccgcttttggcgcgcgcatctggacgttctctatgtcgagcggcgacattatttgcagtggatcaggtaaccaggcaggtacgtttacttttacgaaagcatcgaactctgaccgggagatcaaacacgatatcgtgtataccgacggacaggaatcgtacgagaacgttaaaaaatactcacccacgtcattcgtctataaagacgatcagcagggcagaaagcgtcgcggggtaattgcacaggatgtgcaggagattgatccggaatatgtacgcgccatccttaaccctttcacgatgaaaaccagcctttccctcgacactaacgtcatgctgcttgatgtggcgctggccctgaaagtagccatatcaaaaatcgaggccctggaacaaacaattcaacagctgcgctatggctcctga

SEQ ID NO: 849 - DNA, 1269 bp, Kosakonia cowanii
  source 1..1269: mol_type = genomic DNA
atgatttacacaactggctctatcgcggtcagcggcaataccctgaccggtaccggcacgaatttcaccgcagcaggttcccttatccgtaacggctgcacggtgctggcactgaccagcccggcgcaggcattccagatcaccgccatcaacagcgcgacaggcctcacggtgacgccggcggccagcccggctgttcccgccggcacgaagttcgccattctgctgagtgacagtctttcggttgacggtctggcgcaggatattgcggagaccttcaccatgtaccagggctacatgagcggctttgctgacgttatgaaaggtaccggcgatgtgacaatcaccatcaacggcgaaccggttaccgttccgggacagacatcactggtgaagaagggggctaacagcgatatcacttccctgagtggtctcactaccgcgctgagtgttgagcagggtggcactggcgcgaaggatgctgcaggtgcaagaaaagcgcttcagcttggcggtgcggccacacttgaggtgggtactgccgcaggcaccgttgcagcgggaaatgatccacgactggccactctggatggtaagtcaggtggttccattactggtcgaatttcgatgccttccggggcagtgggaacgtacctcagtgcagcccagaatgcgggggtcaggcagcgtgtcgttaatgatgcgagcgcgacgagcgcagtaggggcgctgacgtgggggtataacaacggcagcggttttcagctcgatacaacctggggttcagtgggccttggcgcgtcggcgtggccttacacatttatgatgcagaccgctaatgagacctcttttggcgcgcgcatctggacgttctctatgtccagcggcgacatcatctgcagcggctcaggtaaccaggcgggtacgtttacttttacgaaagcatcaaactctgaccgggagatcaaacacgatatcgtgtacaccgacgggcaggaatcgtacgagaacgttaaaaaatactcacccacgtcattcgtctataacgacgatcagcaggggagaaagcgtcgcggggtaattgcacaggatgtgcaggagatcgacccggaatatgtacgcgccatccttaatccttttacgatgaaaacgagcctttccctcgacactaacgtcatgctgcttgatgtggcgctggccctgaaagtggctatctcaaaaatcgaggctttggaagaaactgttcaacagctgcgctatggctcctga

SEQ ID NO: 850 - DNA, 732 bp, Kosakonia cowanii
  source 1..732: mol_type = genomic DNA
atgaacaaaaccataatgttggctatccgggcgcatgcgctggaggaatccccgcgcgagtgctgcggcttcgttatccagtctggccgtcgccagcgctatatccccgtatcgaacacccacgaaaacccgaccgagcatttccgtatcgatggcgagttctgggcgaatgctgaggacatcggtacaattatacgcgttatacattcccaccccggcgacggtgcacggcctataccgtcagacctggatcgccagcagtgcaacaactccggcgtggtctggggcatttacgcgacggacagcggtgaatacgccgagataatgcccgaggcggtcccacttatcggccgcccgtttatcctgggttcacacgactgttgggggcttatcatggactggcacgccacccagggcgtcacgttagacgatttccgcgtcgattatccgtggtgggaaagtcagtacccggacaacttctatttcgataactgggagcaagaaggcttcatcgaatgtgacccggcgcccgggtgcatggtcatcatgcaggttgaatccgataagtggaaccatgcgggcattatcactgaagaaggtgaactgctccatcacctgtatggccaactctcctgcattactccctatgcccgcggctatttcaaggacaggacgatgatctgcgttcgccacaggagcctgccagaggagataaagccatggcgcgtttaa

SEQ ID NO: 851 - DNA, 711 bp, Kosakonia cowanii
  source 1..711: mol_type = genomic DNA
atgcgggacaagacaattagcgcaattctggcgcatgcggcgcagtcgttcccggctgaatgctgcggtgtggtgatccagaagggacgggttgagaagtatgtcgcctgccggaatctggccgcctccccggaggagcagtttgaactgtcgccggaggattacgcggcagccgaagagcagggtacggtggttgccgtggtgcacagccaccccggcgacggcgccacgacgcagccgagtgagctcgacatgctgatgtgcgacgcgaccgaagtgccgtgggtgattgcttcatggcctgaaggcgatatccgcaccatcatgccgcgaggcgatcgcccgctgaccgggcgtcagtttgtgctcgggcatgctgactgctggtcccttatcagggactattttcgcatcgagcacaatatcgacctgcccgactacagcgttgatcaccactggtgggaggagggcgaaaacctctatatggataactggcacgactgcggattcagggagttcgacggtccccagcagcccggcgatatggtcatcatgcaggtgcaggccagcgtgccgaatcatgccggcatcctgctggaaggtaacatgctgctgcaccacctgtacgggcagctcagccagcgcattccgtatggcggctattaccgtgaccggaccattaaagttttacggtacaaggacctgatgtga

SEQ ID NO: 852 - DNA, 711 bp, Kosakonia cowanii
  source 1..711: mol_type = genomic DNA
atgcgtcagaaaaccattgatgccattttgggacatgccgctactgaatatccgcgcgagtgctgcggcgtggtggcgcagaaaagccgtgttgaacgttacttcgcgtgccggaatcttgccgcagcgccggaggacaattttgtcctttgcccggaagattatgcaactgctgaggactggggaacggtgatcgccatcgcacatagccaccctgacgccacgacacagccgagtgaactggataaagcgcaatgcgatgcaacgcttttgccctggcatatcgtaagctggccggatggggatttacgcaccattcagccgcgcggagaactgccgctgcttgagcgtccgtttgtgcttggtcatttcgactgctggggactggtgatgagctatttccggcaaacgcatagtatcgagctccacgattaccgggtggattatccctggtgggaaaacaactatccggacaacttctatcaggattgctggtatgagtgcggtttccgtgaattcgacggaccaccgaaacccggcgatatggtgatcatgcaggttcaggctgataagtggaatcacgcgggaatcctgcttgaaggaaacctgctgctgcaccatctgtatggtcatctgagccagcgcgtgccctatggtggctactggcaggaaagaacgatgaagattctacgttataaatctctgtgctaa

SEQ ID NO: 853 - DNA, 351 bp, Kosakonia cowanii
  source 1..351: mol_type = genomic DNA
atggctgttgaaacctataaatggcccgcgcaactcggagcgggcgcaattgaatataaccagacaatccgggcctcacagttcggtgatggttatgagcaggtggctgaaaatggtatcaactctactgccattcaggttccgatgatttatgttggcaaagaggtgttgataaacgaaattcgctcattcctgctggctcataccattaaggctttcatcatcacgccacccggcgaggagaaggggttgtatcgggttgtcaaagattctgtgcgtaagaaccagatcagtagcaatgcagcagagcttactttcaccataaagcgcgcctacggcgtctatgcctga

SEQ ID NO: 854 - DNA, 339 bp, Kosakonia cowanii
  source 1..339: mol_type = genomic DNA
atggcagttgagaccttctcctggtgcccgaaggtggccgcgcaggcagataccagcttccgcacccgtaaggcgcagttcggggataactatgcgcaggtggccggggacggcatcaacccggtcacaccgcaatggagcgtgagttttaccggcgatgaagcctatgtcctggccataaaggcgtttctcaagcggcatgccggctggaagtccttcatctggaaaccgcccctggagcccgcggggttatggcgatctgaatccctccagatagccacccacggcaacgacaaatacaccctcagtaccacattcattcaggcataccatccatga

SEQ ID NO: 855 - DNA, 342 bp, Kosakonia cowanii
  source 1..342: mol_type = genomic DNA
atgatggctattgaagaatttacgtggtgcccacgtattaatgcgcagcaggaggtgactttccggacgcgcaccgcgcagtttggcgaaggttataagcaggtgtcaggggacggactcaatcccagatcgcagaaatggacgatggagtttaccggcgatgaagcctatatagcagctatcaaagcgtttctggatcgccatggcggcacccggtcattttcgtggcgcccgccgcttgagccgctgggactctaccgctgcaacacctacacgccgacgcctcttggcgccagaaaatataacctctccgcaacttttgaacaggcgtttgcaccatga

SEQ ID NO: 856 - DNA, 3717 bp, Kosakonia cowanii
  source 1..3717: mol_type = genomic DNA
atgtctgatattgcaacaatttcgctccgggtgaataccgccgagctggagcgcgggaacaaggcgctggacgatttccagcagacggccggcggcgcggcaaacaaggccgatgatctgaactcggtatttcgcgcgggtgcatccgatcagaaaaagaatacccagagcctgaaagagcagcaacaggagctgcaaaacctgctgaataaaatcagtcctgttaaccgggcaatggacgaactggaaacgctgcaaagcaaactggctggctttcgtggcaagggactgctcggtaatgaggattacagccggtttagcgcagtgctggataccacccgagataaattatttcaggtcatggaagcggagaccgcagaagggcaggagcgactgaagctggctcaggacacgcagcgagccgccgcagcgcaggactcgttcctgaactctctgagcgagcaggctgctacctttcgggcctcaaagtcagatgtgcttgagtatcgcgcctccatactgggtttaacgcaagaagccgccccgctgattcagcaaatcagggaaagagaactggctatcgccagtgaggctatgcagacccggattgccgcacaagagcttcgtgagaaacaggccgcagagcgccaggcgttagctgaagcatcccgcctgcaggcgcagaatgataacttcgttgagtcgctccgtaatcaggcactggccatcggtaaatcacgtgctgaggtgcttgagctgaaagcggctcagatgggactgctgcaggaggccggaccgtacatcgctgtgcttaaggcgcaggaggccgcaaccgcacaggaagcagcaaataaaaaagtttctgccatgcaatcccgcatgctcagggatgcgattgcagagctggaggctgcagagcgcgccgaggcatccgagatgcaacgtgcgcagaatatccgcgactcatttgttcggaccctcgaacagcaggcaacatcgatcgggaaaacgcgggtcgaattgctggaaatgaaggctgcccaactcggtgtttcacagcaggcagctccttttatcgaaaagcttcgtgagcaggatgaagcatggaagaagggaggcattagtgccgggcagtaccggcaggcattgagaatgttgccagcgcagtttacggatattgccacgtccattgctggtggcatgccattgtggatggtgttgatccagcagggcgggcaaatcagtgattcttttggcggtctgggcgggctttttcagtttatcaaggaagaggttcttgggtttaaagaggcaacagacgactcttcagaatcactctcagaaaatgcgaactcactcgctgagaatgccgaacatggcagggggatgcttgctttcctgactcctgccaggcttgctgttggtgggcttgtgggggtggcttcacttctcgcaattgcatggtacaaaggcgcccaggaagccagtgagttcaacaagcagcttatcttaaccggaaactatgctggtaaaacggcggggcaacttagtcaactttccaggcaaatagctgatgatgctggtgtgacaataggagaatcatcggcaactctggcgaaaattgttgggtcgggaagatttgatggaaataaacttgaggttgttgcaagagcagctgcggccatggaggacgcggttgggcagtcagtagatactacgattgctaatttccagaaactttacgactcaccagtaaaggcgtccattgagctaaacagtcagttgcattacttaactgcggcggagtttcagtacatttcggctcttgagcgccgcggtgataaggaagaagcagggcaaaaagctgctgatagttatagtcgggcagaacagcaacgcagccagcaggttattgacaaccttggccttattgatcaggtgattcgtggcgtatctgatacatggaaagcatattgggatgcagccttaggtattggtagaaaagagtcgacagctgaacagcttgaggttgtgaggcaaagaattaaagaaatcaccaatcaatcccgcccaggtgtttttggtatgggtaatgtcggtgatggtggtgctgcaaaaagggagttggcggcattgcttcagcaagagagagagcttggatttgttattaaatctcaggaaggttacaaccagaaaaaggcagagtttaataagataaatcaagctggtattgatgcgcagatatcgtttaataaatatctggatgctggaaccacccaggcagaaaaaagagctctggcacaaaaggatttgaacaaagctattgccgataacgcgaaagcagttaaagcgacgcagggcttgccgtatgagcagagagtcaagccattgactcctgaacaaatatctaaggcccgagctggcatcgagaagctgtataaagatccaaaaacccctaaagccaagggcataacggtggcagcaggggatcgtgccgaagattctgcgcaggctgaacttctggccctccaggctcagctgaaaacccttcaggatcaccgctctgtcaatgacaccatcagtcagcagcgtaaagacctgtatgccactgaatctaaatttgctgtccttgaaacggccgcgagcacccggcaattatcgaagcaggagaagtctctgctcgcgagcaaaaaccaggtgctgcaacttgcgcagcagaaagctcttctcggtgaccagattaccgctcaggagcaactgaataagcggatggatacggcgcagaagtacgttactcagatggtggagaagcaaaccgggcttgcatctggagccacaatgagtgacagacttgccgggcgacaggcatctctgtcccagttacgcagtggctggctcaatgcaggcggtggtctcaatgatgacggttataagcgggagttaaaggccgctaatgattactacgcagcagaagacaaactacgtggcgactggatggcaggcgccagaaaaggctgggccgagtatcttgatgcggcaaccaacgtttatggctcaatgcaaagcgtagcgcagtcagccctgggcggtatatcagatatgctgacaaacctggtcactaccggaacggccagtttcaaaagtttcgctgcctccatgatgaagatgatcgctgatgtgattaatcgactgctggtggcgtacaccgtgcaggccgcaatgggatggatttctacaggtacttcaccagcaggtagtggtgcaggccagtcttttgctgtcccgtctttccggccagcgtggaacgggggatatatccctgaattcgacaccggcggttacacaggcgatggcggcaaatatcagccaaaaggggtggtacacggcggtgagttcgtctttaccaaagaggccacagctgcaatcggtgtcaataatctttatgcgatgatgcgtggtgctcagggatatgctgaaggtggggttgtcggcaggccgcccatgctggggcttatgtccggttctggtaatgctgcaccggtaattaacaccactgtaaacgtcgatgccaatggtaacccttcggctcaatccagcatctctggggacgctatggggcgcgccatggcggctgaaatacaaaacgctgcaaccctggtagttcagaggcacctgaagccagggggcatgatctacaacttcaccaagggcagataa

SEQ ID NO: 857 - DNA, 3492 bp, Kosakonia cowanii
  source 1..3492: mol_type = genomic DNA
atggcaacgcttcgcgaacttattataaaaatttctgctgactccagctcattccagagtgagatcacccgcgcctctcgcatgggctccgactattacagaacaatgcaggcgggaggccgccaggcggcggcggcggctaaagaaagtgaaagggcgttatctgatctcactaatggttttgcctcagcaggtaaagccgcagctgcggcaactgcggcttttgctacagggaagctggtgcagattgcagacgaatggaactcagtgaatgctcgtcttcaacaggcttctgcttcggctgatgattttgcgacttcacaacgtcagcttatggaaatcagtcagcgcacgggtacagcgttctctgataatgccaacctctttgcccgtgcagctgcatcgatgcgcgaatacggttatagctcggaagaggtgctcaaaatcaccgaagccgtttcaactggtcttaaactatcgggtgccagtacagctgaggcaggttcagtaatcaatcagttcagtcaggcactcgcccagggcgtgctacgtggtgaggaattcaatacggtcaacgaatcgggtgatcgtgtcatccgcgcccttgccacaggtatgggcgtagcgcgcaaagatctcaaaagtatggccgaccagggaaagctaacgatcgataaagtggtgccagcattaatgagccagctcggggcgttacagggcgagtttgcaacgatgccgcaaactgtttcgggctcattgcaaaaggtcactaactcgttcatggggtgggtaggtggtgttaacgctgcaacaggtgccacggatgcgctgtccggtgggcttgatggtgtagcccagacactggactcctttacttcttccgcggtgagcggtgctctgagtgatgtggccgacaatatgtcggttatcacaaccgtagcaggcgcgctggtgggcgttggcctggctaagtatctcagcggaattgttaccagcgccacgagtgcgacaggtgctttgatctctgccgcgaaatcagaagttgctctcgctgtagcgcaagacagggcagcccagtcagctgtggcagcttccagagctgacgtctatcgtgcacagcaagctttgcagagagcaaagggcgctgatgttcaggctgctcagcaggaaaaaatagcagccgcagaggcaaaggtaacagcagcacagtccaggctcacgacggctcttgccggaggtacagcaacagagaaagtcagggcaagagcagcgcttgagcgtgctcaggcaggtcttgcagctgctaaaaatgcggacgtacaggcagttgctgaacgacgactggcacaggcagaggccgcgcgtgacaggaacctggccaaccgtgtctcaacccaaagtaatctaaacagtgtaaccgctgtcggatcgcggctcatgagtagtgctctgggagttatcggtggtattccagggctggtgatgcttggcgcaggagcatggtatgcggcgtatcagaatcaggaacaggctcgccgttctgctcaggaatacggcagaacgatagatgagataagcaaaaagaccagggcgatgtctttgccggaagcttccgacaatagtgaaaaagccaaaaaagctcttgatgaacagaacaggcttatcgatgagcaaaaaagcaaaattgaaagtctgaaagagcagattgccggatcgcagtatctaatcaacaaccctggcccgactacgaaaggtggtttcatgatcaaccaccttacctctctgaagactgtaactgatgatctgtcgactgcaactgagcagttgtcggttgaacaggaaagactttctcagatgcaggagaaagcagcctccatccaacaaactctcgaggggctccagtaccgtcgggtctcgctgattagagaggaagcggctaatcagaattctgcctaccagtctctgctgatgatgaacggccagcatcaaacatttaaccagcttctcgggctcggcaatcagttactgatggcccgccagggaatgaccctggcacccctgcgtgttcctcaggcagaagcctcgcaaaaacagaccgaggcgctcgaaaaaagccgacgcgagctggccctgtcccgcctgaaaggggaggcaaaagagcgcgcgcggcttggctatgctgctgatgaactcggtctgacggctgatccgcaattccagaccaaccggcttgagtacatcaataacgggcttgaagagtggcgcaataacgaggccaacaaaaagcagcccaaagggccaaagacggacgaagaaaaggccgctgatgcttataaaaggatgatcaagcagcagaaggagcagatcgcccttcagggccagagcaccgaacttgccagggtgaaataccaggtggttgaaggtgaattgtccaccctggacaaggcgcagaaggctgaactgatgcgcaacgctgcgttaatcgatcaggtcaaacttcgcgagcagttgcgtaattacgaggcgaatcttgccgacagcaacgccagcgcccgggcggccaatgatgcacagctcatcggttacggtcagggcacccgcttccgtgagcggatgcaggagcagttcaatatccgcaaggagtttgagcagaagaatgccgatctgctccggcagcggcaggccggggatattgacgaaaccttctaccagcaggggctggcactcaacaaacgctatctggaagagcggctgcgcgaccaggagggatattacaccgcttccgatgcgcagcgcggtgactggttaacaggcatgtcagagggctatgcgaactgggtggaagaggcaacggactacgccggtatggctgcggacgggatgaagcaggcgatgggcggggcggtgaccaccattaccgacatgctcaacggcaatctcgacagctggaaggactggggcatgaacgtgctgaaaattatcgaaaccgttctcgttaatatgatggtcgcgaatgccgcgagttctctcggctcactcttcagctttggtgcctcatccgccgcaacggccagcagcgggacggccattcagagcgctgcctcaaactttaccttcaacgccaaaggcaatgtctacgactcaccctccctgagtgcatacagcggtggcgtctaccagactccgcagctgtttgcctttgcgaaaggggccggggtgtttggtgaggcaggtccggaggcaattatgccgctcacgcgcgcggcggatggttcgctcggcgttcgcgcagtcggcgcgccgcagttttccggcggtggcccgtccgtgtcgtttggcgatatcaatatcaacggcggcgcgcagtccacggcaggtcagggggcagccgcaactgccggcaggcaactcaaggatgcgatcgtgacggtcattaatgagcaggccagcatgcccgggtcgccgttgtggcggcttttgaaaggagcgtaa

SEQ ID NO: 858 - DNA, 3516 bp, Kosakonia cowanii
  source 1..3516: mol_type = genomic DNA
atggctacgctgcgcgaactcatcatcaagatctcggcaaattcccagtcatttcagaccgagattgcccgtgcgtcgcggatggggcaggactattaccgtgtcatgcaaaacgggggccgtcaggctgccgctgctgcgcgtgaaagcgagagagcgctgtcagatttaaccagtggttttgcatccgccggcagggcggcggcggcggctactgccgctttcgccaccgggaaaattgttcagatcgctgatgaatggacatcggtgaatgcgcggttacgtcaggcttccgcatcctctgacgactttgccaattctcagcggcggctgatgtctatcagccaggctaccggtaccgcttttaccgataatgccaacctgttttctcgcgctgcagcctctatgcgtgaattcggttacagctctgatgaagtgctgaaagtcacggaagctgtcagtacgggtcttaagctgtccggtgccagcaccgctgaagccggatcggtgatcacccagttcagtcaggcactggctcagggcgtattgcgtggcgaagagtttaatgctgtcaacgaaagcggagaccgcgttatcagggcgctggcggctggcatgggcgttgcgcgtaaagatctcaaatcaatggccgatcagggaaaactgaccattgatgttgttgtccctgccatcatcagccagctcggcaagctccagggcgagttcgccgcgatgccgcagacggtttccggatctgtggaaaaagttgcgaactcctttatggcctgggtgggcggtatcagccaggccaccggcgccaccgatatgttatccggcggccttgatggtcttgctgccacgctcgacagcctcacctcatcagccgttacgggtgcgctgaatgatgtcgccgacaatatggcgacgatcaccaccgttgccggggcactggtcggtgtggggcttgctaaataccttggcggtattgttaccagtgccaccggcgccaccacctctcttatcgcggcagcaaaatcagaagtggcactcgccgtggcacaggacagagcggcacaatcttctgtggccgcagcacgcgccgacgtttatcgcgcgcagcaggcactacagcgcgcaaaaagcgctgatgttcaggcggcccagcaggagcgcgtcgccgcggcagaagcgaaagtgacagcggcacaggcccggctgacggctgcacaggccagcggcacggcaacggagaaagtaaaggcgcgttccgcactggagcgtgcgcaggcggcactggttgccgctaaaagcactgatgctcaggcagtggctgaacgacgtctggccgctgcccagacagggctcaacaacaacatcgcaaaccgcgtgaccgcccagaataacctgaacggcgtcaccagcgtcggcacccgacttcttggcggcgccatgggactgattggtggcattcccggactggtaatgcttggtgccggcgcatggtacgcgatgtaccagaatcaggagcaggccagacaatccgcgcaggaatacgcaaaaaccattgatgaggtcagccagaaaacacgggcaatgactctgcctgaagcagaggataatcgcggtaaaacagtccaggctctcgtggagcagaaccggctgattgacgagcaggaaaaagccattgctgctgttaaaaggcagcttgatgacctgaataaaacgcgcgggcagccggggatgaccggtgataacgatctcaacatcgttaaagcgatggggattctgaccgatcagctgaccgttgaagaagataaactcaaccagatgcgcgagaaatcgcgcggtattcagcaggctctcgaagcgattgagcgtcgcagaaatgatttaattcgtgagcatgcctggcggcagaatgcgcaataccagtctctgctgatgatgaacgggcaatatgaggatttcaacaggctgctcgggcttggaaatcagttactggcttcgcgcagccagttgattaaagcgccttttgccatcccgcaggcgccggtatcggataatgacaagcaggcactgctacaaaaacagcagacggcggagctggccgggttaaccggtctggacaaagtaaaccggcaggtcgattttgaactgcagaagatgggaaagaccggccctgagaactccaaattcgccgcgggatggcggcaggctgcaatcgatgagtacaacaaatcccagagccttgctgctgcacaaaaggcgcaagccgagtccacacgagacgccggtaaggcacagcgggaagcagcgcaaactgctgagcagtacagccgtaaaatcgccgatctcagtgtcgcaatcgaagtgcagaaagtccgggctaaagagggtgaacaggcagcagaactctacgcagccgctaaccagaccggggcaaaatggactgaagagcagcgcaccgcgatacgagcgcagtctgctgagctggccagactgacccagctagcagacgatcatgtccgcaagatccgtgaacaggctgatgcgctgaaagacctccgggaagcaagccgtaaattcagtgacgaggctgcgtttgctgctgagacatccgggatgggggatcgtcaaaagcaacggtatgaagaaacacagcaggttgagcgcgttttttctaaaaccgatcagagcactcgggctatccatgaaagagaaatggcgctggccagtctggataaaaaatacagggaaattgcggcgtctgaatcgaactggcgaaacggtgtatcgcgcggctataacagctggttcgatgagatgacgaacatcgcgggaaccgtctctgatggtgtgaaatcgtcgcttgatggcgcgttcagtaacgtcacggccatgctcgagggaaacaaggtatcctggaaatcatggggcatttcggtcctgcagatcattgaaaaagtcgcacttcagatggcggttgtcagtgctatgggcagcgtttcatcatcttccggactgattggatcactcgtgggtggcgttaccagctttttctcaggaggcggtgcaggcgcttcgcctgcaggtcagtcattcgcagtaccttctttcacccctaatgcgctgggtggcgtatatgattcgccctccctgagtacctacagtaacggcatctataactccccgcagttttttgcttttgcacagggcgcaggggtgtttgctgaagccgggccggaggccatcatgcccctcacgcgcgcttccgatggctctctcggcgttcgtgccgttggttcaggcgtgaataacgtgtcgaccgctgccggtgctgcgccccaggtaaatgtctatatcacggacagcgggaacaagagcactgcgacgccgggttacgaacagcttgggcgggaagcgggggcgtttatcgatcgccgctaccgggagcttattggtcgtgatctggcacccggcggcaatatctggaatctggctagaggtaatcgatga

SEQ ID NO: 859 - DNA, 3321 bp, Kosakonia cowanii
  source 1..3321: mol_type = genomic DNA
atggaaacgatcactggtgcaaagggtggcagccagaagcagcacacgcctgtagaacagccagatagtgcccagtcgatggcgcgctgccgcatcttgctggcgcttggtgaaggggaattcgccggcggcctggatgcaactcgtatttttctggacgggacgccgctgggcaatgccgacgggacgatgaattttgaaaacgtcacatgggatttccgaccgggcacccagacacagaccccgatccctggctttgccgcggtcgagaatgaaaccagtattggcgtatcgctgacgaaagttaccccctggacccgcgcgctgagtaatacccagattgatgcggtgctcgtgcgcattggcattcccggcctgcagcaacagcagaataatggcgatatcgttggtacgactgtcaaatatcacatcgacctggccgtagacggcggcgcgttctcgacggttatgaccaggaccgtcaccgagaagctcagctcgctttatgagcttacccaccgcatcaaccttcctaaagcaactaccggctggcagattcgtgtggtacgcgatacggacgacagcaccagccagatgctgcagaacaaaacgcaggtgcaggccatcaccgaggttatcgacgctcgtcttcgttatccgcacacagcactgttgtatgtgtcgtttaatgcaaaatcattcagcgatataccgaaaatctcctgtaaaccgaaggggcgcatcatccgaatcccctcaaactacgatccggtagcccgtgcttacagcggcacctgggatggcacgttcaagtggggatggtcgaacaacccggcatggatctggttcgacgttctgaccgaaccacgtttcggccttggccgccgcatcactgcggatatgctggataagtgggagctataccgtatagcccaacgttgcgatcagaaggtgcccgacggaaagggcggcagcggcaccgagccgcgctttatgtttgacgtttatatacagtctcaggccgacgcatggcaggtgatcaaggatatcgccgccgggtttaacgggatgacgttctggggcaacaacatgttcaacgttgtctctgacatgccggcggacacgtcgaaactgcagatcctcacccgcgccgcagtgatcggcaagccggtctactcaagcggaagtgaaaagacccgtttttccagcgcgctgattaatttcagcgacccggacaatcactatcaggatcgaactacggcggtgatgttcccggacctggtgaaacagttcaagtttaaacagacgcaaatcacagcgatcggctgtacgcgagagagtgaggctcagcgtcgtggtggttgggcggtgtattccaactctcttgaccgcattatcaccctacaaactgggcttgatggctatgtctttgtgccgggcacggtgtttgcctttgccgatgaacgtctttctggtcgcgtgtacggtggtcgagttgcggggtacaacggcgggctgaaggctgtgacaactgatcggggcaccagcgcggttgctggcgacacgctgatgattcgcacgcagggtggaaccgtcgaaagtcgggttatccaggctgtaaatggtacgcagcttgtggtgtccacgcccttcaaggcggaccctttgccgaatgcagtatttgttatagacgccgggcagttgagattacagtactttagagtaactaatctgacgttcaatgatgaggaaaatacctactccatcaccggggcagaatataactcctctaaatatgacgcggttgataataatgcccgactggatacgccgccgatcagcctgattccgaccgggcttgttaatcagccgactaatatccaggtatcaagctttgaatccgtaagacaggggcagcgaattactacactgatcgcatcctgggatgcgccactggataaaaatggcaggcctcaggctgatgttatctcataccaggtgcaatggaagcgcggagataatgaatggattaacgtgccagaaacaggactgcgcaatatagaagtgaccggcatttttgagggtgactatctggtacgcgtgcgtgccatcaactcaggaggggcttcaagtctgtgggcctcttcacttctgactcacctgaaggggcgcgtgggagatgttccaaagccggtaggtctgtctgcgtcagaggatgtcgtattcggaatcaatatcacctggggttttccgacagatactgctgatacgctgagcacggaactgcagtacagcctcgctgcagacggctcaaacccgatgctgctggcggctgtgccttacccgcagaaactctaccagcagatgggtctcaaggcggggcaggagttttggtaccgggccaggcttgttgaccgtaccggcaatcagtcagcctacaccgactggatccgcggccagtccagctccgatgtgacggacattacagaggcggtgctcgagcagatcaaggataccggcctgttcaaagacctcatcgagaacgccgtggagggcagccaggcggtcgcggatctggctgaggcagtgaagcagaacgccgacggactggctgctgctgccggagcaacccggcagacagcagaagccatcatcggtaatgctctggcgattgcggatgttgttgtccggcagtcagcccagcagggcgctaactcggcgcggttcgaacagttgcgcgaggttattgccaccgaaaccgaggcgcgcgttacggatgtgatccgcctggaggcgaagacagaccagaacacggccggtattaccgaggtgcgacaggcgctggcaaacgaaaccgaggcacgggcaacagctgtcgatcagcttaccgctcagacggaagagaacaaggccagtttcacagagctgacgcagaccgtgacggatctggattcctcgaccgcttcgcgctttgaggaaatttcggcagagatcgcgggcattgatggcaatgaaatcagagggggaatacagagcaactccattgcgctgatcacctacacgctggcgcaggtcaacacccggaccctgctcagcgtgcagtacggcgacaacaaggcagggattcagcgcgttgacaacgtgatggcggacgccagccaggctgttgcggagtcgctcaggacgctggatgccagcgccggcggcggcacggcaacagccactgactttgctaaaactatggctgatttttcgcaggtctccgcgaccagaatcaactccctttcagtgacggtaaacagtcagcaggcggcgatcgtt

SEQ ID NO: 860 - DNA, 3441 bp, Kosakonia cowanii
  source 1..3441: mol_type = genomic DNA
atgacgaacacagcgattaaagggcgtaagggcggtagcacaaagactcgcaccccggtggaagccccggacagtattcagtccatagccagggcgaaaatcctcgtcgcgctcggcgaaggtgaattcgccggcgggctggacgggcgcagcatttatcttggtgatgcgtcatcgtataccccgctgcagaatgccgacggcagttttaacttcaacaacgtcaaatatgaattccgttccggcactcaggaccagagttatattcagggctttccgggcgttgagaatgagctgcaggtcgcttacgaactcaaagctgccgtgccgtatgtgcgctctgtctccaatacccagctttccgccctgcgcatccgcctgggctggccctcgctgctgaaccagaaagataacggcgataaagtgggtacgcgcgttgagtatgcgatcgacctgtctgccgacggcggcacatatgtgacggtggtcaacggtgctgtcgatgacaagaccaccaccctttatgagcgcagtcatcgtatcgacctgccaaaagccacaaccggctggcagctgcgcgtgcgccggataacgccggattcaacgacggtgaacattgtggacagcatgcgcgtcgaggcggtcaccgaaatcattgatgcaaagctgcgttatcccaacacggcgctgctctacattgaatttgatgcgaagcagttcccgaacggtattccacaggtggtgtgcaatccgaaggggcgcattattcgcgtacctgatacctacgatcccgacacgcgcacctattccggcacctgggaaggcgggtttaaatgggcatggaccgataaccctgcgtggatttattacgacatcgtgctgaatgagctgttcgggcttggtaagaggattgatgcgacccagattgataaatgggagctgtaccgtatcgcgcagtactgcgatcagctggcgccggatggcaaaggtggcagcggtatggagccgcgctttcgctgcaacgtctacattcaggagcgcaatgacgcctggacggtgctgcgtgacctggccggcatattccgtggcatgacctactggggcgacaacaagctgtatgtgctggccgatatgccccgcgatatctggcacatctataaccatgccagtgtggtcaacggtaagtttacctttgccgatcccagcgaaactacgcgcaacaccgccgcgctggtgaactggtccgatccggcgaatcactacaaagacacgcccgaagtcgtttatgacaacgagctggcgatgcgcttcgattacagccagctcgaaatgacggccatcggctgcacccggcagtcagaggcaaaccggcgcgggcgctgggcgctgctcaccaacggcatcggtgaggtggtgaccttcagtacgggtatggatgttccccctgtcggtgaggtgatcggcgtggccgcgaacgagctggctggcagggtgattggcggcagggtaagcgcggtcagcggtcgtaatatcacgctcgaccgtgccgcagatgtcaaagccagcaaccggctcttcctcaatctgccgtcaggtgcggcgcaggcccggaccgtgcaggcggttaacggcaatatcgtcaccgtcaccaccgcctacagtgaaacgcctgaggcggagtgctgctggggtgtggatgctgacgatctgtttatcgcgctctttcgtgttacgggcacccgtgacaacgatgacggcactttcgaggtgaccggcgcgacgtacagcccggatatttacgctgcggttgatactggcgcccggctcgatgagaggccggtcagcgtcatcccgcccggggtgcaggctccaccggaaaatatcgttatcgacagctactcgacgatcagccagaacattgcgatcaccaccatgcgtgtggcctggaattctgttaaaggggcaatcgcctacgaagccgagtggcgccgcgatagcggcaactgggtgagtgtaccccgcacgtcctccctggggtttgaggtgccgggtatctacgccgggcgttatctggtgcgggtgcgggcagtaaatgccagcgatgtctcgtccatatgggcgacatcagctgaggtcacgctcaccgggaaagtgggtaatcctccgaaaccggtaggcttaaccgcctcggaaactgttgtgtttggtatcgagctgaactggggcttcccggcaaacacggacgacacgctgcaaacggagatccagtacagcctgaccggcagcgatggcgatgccatgctgctggccgacgtcccctatccgctgcgtaagtatcagcagatgggtctgaagaccgggcaggttttctggtaccgcgcgcagctggtggaccggaccggtaacgaatccggttataccgactgggtgcgcggccagtccagctccgatgtgaccgatattacagaggcggtgctcgcgcagatcaaggataccgacctgtttaaagacctcattgagaacgccgtggacagcagcgccaaagttgcggagctggcagaggcagtgaggcagaacgctgacggcctggctgcggcggcaggcgcaaaccgtcagacggcagaagccattatcggcaatgccctggcgatcgccgacatggtggtgcgccagtcagcccagcagggcgctaactcggcgcggttcgaacagctgcgcgaggtgatcgccaccgaaaccggggcgcgcgttaccgatgtgatccgcctggaggcaaagacagaccagaacgccgccggtattaccgaggtgcgccagacgctggcaaacgaaaccgaggcacgggcgacagctgtcgatcagcttaccgctcagacggaagagaacaaggccagtgtcacagagctgacgcagaccgtgacggatctggattcctcgaccgcctcgcgctttgaggaaatttcggcagagatcgcgggcattgatggcagcgatatcagagggggaatacagagcaactccattgcgctgatgaccaacacgctggcgcaggtcagtctgtccaaccgaatgagcgtgcagtacggcgctaacgccgccagtattcagcgtgttgatactgtgatggcggacgccagccaggccgttgcagagtcgctcaggacgctggatgccagcgcgggcggcggcacggcaaatgccactgactttgccaaaacgatggcggatttttcgcaggtttccgcgaccagaatcaactccctttcagtgacggtaaacggtcagcaggcggcgatagtccagaatgctcaggtttctgccgacatcaacaataacctgaatgcgatgtacagcatcaaggtgggcgtcgatgccaatggccgccagtatgccgcgggtatgggtatcggtgtacagaactcttcttctggcatgcagtcg

SEQ ID NO: 861 - DNA, 3759 bp, Kosakonia cowanii
  source 1..3759: mol_type = genomic DNA
atggcacacgctaccgtaatcagaggaagcaagggcggcggttcaaaatcccgcacgcctaccgaacagcctgacgatcttcagtctgttgcaaaggctaaaattttgatcgcgctgggggagggggaattctcaggccagttaaccggtaaggatatttatcttgatggtaccgcgattgaaaacgctgacggcactcagaactttagcggtgtcacctgggagtttcgtccgggtacccaggcgcagaattacattcagggaattcccggtaccgaaaacgaaatcaacgtcggcactgaagtctccagcgcagtagcctggactcgcacgtttaccaatacccagttgtcagccgttcgcctgcgtctgaagtggccctcgctttttaaacaggaggacgacggcgatctggtcggttactcggttaattatgcgattgacctgcagaccgacggcggcacatggcagacgatacttaataccagtgtgaccggcaaaaccacgtctggttacgagcgcagtcatcgtatcgatctccctcaggcgggcagtacatggacaattcgcctccgcaaaattactcctgatgcgagcagcgctaagatcggcgatacgatgacgctgcagagctttactgaagtgattgacgcaaagctgcgctatccaaataccgcgctgctttacatcgaatttgactcaagccagttcaacggctctatcccgcagatttcctgcgagccacgcggccgcgtgatccgcgtgccggacacttatgacccggagacacgcgcctatagcggtatctggcagggtgcttttaaatgggcatggacagacaatcccgcgtggattttttatgatctggttgtgactgatcgctttggcctgggtcaacggcttactgcggcgaacatcgataaatggacgctctaccagattgcacagtattgcgatcagcaggtccccgacggaaagggcgggagtggtacagagcctcgttacacctgtaatgtttacatccaggaccgaaatgaggcctatacggttctgcgtgactttgctgccatattcagaggtatgacctactggggcggagatcagatcgttgcgctggctgacatgccgcgtgatgtggattacagctatacccgagccaacgtagtgggcggacggtttgcgtattcgagcagcacaacgaaaagccgctacaccacagcgctggtttcatggtcagatcctggcaacgcctatgcagacgcgatggagccggtatttgagcaggcgctggtggcgcggtacggcttcaatcagctggaaatgacagccatcggctgcacccggcaatcagaagcgaaccgaaaggggcgctggggtattctcaccaataacaaagatcgtgtggtttccttcgacgttggtcttgacggtaacatcccgcaacctggctacatcatcgctgtggctgacgaaatgctgtctggcaaggttatgggtgggcgcatcagcgccgtcaacggcagggttatcactctggatcgtaaaccagatgccgtcgctggcggccgtcttatcctgaatttaccttccggggcttctcagatccgtaccattcaggcggtcaacggaaattcagttacagtcatgacggcttatagcgaaacgccagaacctgaggctgtctgggttgttgagtctgacgaactctacgcgcagcagtatcgtgttgtcagtgtctccgataacgatgatggcactttctctgtttctggtgcctggcacgatccggataaatatgcccgcatcgataccggagcggtcattgaccagcgaccagtgagcgtgatccctccgggtaaccaggcactgccggctaacatcgccatcagctccttctcagtggttcagcaaaatatcagcgttgaaacgatgcgcgtgagctgggatcaggcgcagaacgctatcgcctatgaagcgcaatggcgacgtaatgacggtaactgggttaacgtgccgcgcaactccactacttccttcgacgtaccgggtatctatgccggtcgctatctggtgcgtgtgcgggcaatcaatgcagccgagatttcatccgggtggggctattcagaagagaaaacgctcaccgggaaagtgggtaatccgccgaaaccggtaggcttcaccgcctcggaaactgttgtgtttggtatcgagctgaactggggcttcccggcaaacacggacgacacgctgaaaacggagatccagtacagcctgaccggaaccgacgacgatgccatgctgctggccgacgtgccttacccgctgcgtaagtatcagcagatggggctcaaggccgggcaggttttctggtaccgcgcgcagctggtggaccggaccggtaacgaatccggttacacagactggatccgcggtcagtccagctccgatgtgaccgatattacagaggccgtgctcgagcagatcaagggtaccgacctgtttaaagacctcatcgagaacgccgtggagggcagccaggcggtcgctgatctggctgaggcagtcaaacagaacgccgacggcctggctgcggcggcaggcgcaaaccgccagacggcagaagctatcatcggcaatgctctggcgatcgccgacgtggtggtgcgccagtcagcccagcagggcgctaactccgcgaaattcgagcagctgcgggaggtgatcgccaccgagaccggggcgcgcgttaccgatgtgatccgcctggaggcaaagacagaccagaatgccgccggcatcaccgaagtgcgccaggcgctgtcaaacgagagcgaggcccgcgcttcagcggtagacgagctgaccgcgaagacggagaaaaacgcggcaaatgtcaccgtgctgacacagaccgtaacggatctggactcctccaccgcctcgcgctttgaggagatatcggcagagatcgcaggcatagatggcagcgatatcagagggggaatacagagcaactccattgcactgatcaccaacacgctggcgcaggtcaacacccggaacctgctcagcgtgcagtacggcgacaacaaggcagggattcagcgcgttgacaacgtgatggcggacgccagccaggctgttgcggagtcgctcagaacgctggatgccagcgccggcggcggcacggcaaatgccactgattttgcgaaaacgatggcggatttttcgcaggtttccgcgacaaaaattaactccctgtcagtgacggtaaacggtcagcaggcggcaatcgtccagaattcgcaggcggttgcagatatcagcggtaacctttctgccatgtacagcatcaaggtggccgtggatgccgctggccgccagtatgccgcgggtatggggatcggtgtacagaactctccttctggcatgcagtcgcaggtgctctttctggccgaccgtttcgccgtgatgtcgcaggcaggcggaacggtaagcctgccgttcgtggtgcaaaacgggcaggcgattatcaacgaagcatttatgaattatgcgtcgctcaccctcgcccgggtcggttcctggtattcagctaattatgtggccgggcagaccgggaccatcatgaaagcggacgggacgtttgaggtcaacggcgcggtatcgggccagggaaggatgcagataacgaacaaccgcatcatctcctacgatgcgcaaaaccggccggcagctgttatggggcaacgcttataa

SEQ ID NO: 862 - DNA, 774 bp, Kosakonia cowanii
  source 1..774: mol_type = genomic DNA
atgacagcacttattgatacggcagccatgcttgcacctggcggaaaagtcaggctggtagaagtggacgcctcagaattcagtggtggtattcaccgctttcattacagtccttttccgcatactccacgggagattgacgaggcgcagggtgacgaaagcaagctcgggcccaagcctgtagttttcgatggtgaggtctatgatttctggcctttccagttaacaggcctggctctctcaactgaccaggcggcagagccgtcactcagcgtctcaaaccttgacggccatatctccgcgctatgccttcagtttaaggacatggtgaacgcgaaggtgagcattatcgacacctatacggtgtatctggatgcggtgaattttcccgaccacgtcaatccctctgccgatccgactatgttcacgcttcagaccttctggctggataccaaaacgtccgaagatgacgaggtcgtgacctgggggctaagcagcccggcagacctgcaggggctggtaattcccaccagacaaattacttccctctgtgaatgggcgctacgcggacaataccggagcggtgacggttgcacctataacggtacggcttacttcgatgcaaagggaaaccccgtagcggatccggcccttgatgtctgcggcggttgcctgagtgactgtcggaaacgattcggtgccgggcttgcagagccaaacgcggcgatcctcgattttggcggcttcccggcgacggttcttttcacccgttaa

SEQ ID NO: 863 - DNA, 759 bp, Kosakonia cowanii
  source 1..759: mol_type = genomic DNA
atgagtatttcatctgatgtccagaaactggagccgggcagccgcgtccgccttatcgaggtcgacggtgaagctttcggtgccggtattctgcggtttcataacgaaaccatccctcacacagaggccgagatcactgccgccggcggcgatgcgtcaaagcttccgccgaagtctgtctggtggcaggggctggagtacggtgcgtggccctttgaactgaccggcctgtccgtcagcagtgacgggcagagcgcccgcccgacactgaccgtggcaaatatcagcggcaccattggcgcgctctgtcgccgctttcagggaatggcaaaggcaaaagtgattatccacgagaccttcgctcattatcttgatgcccgcaacttcgccagcggcaatcctggcgcaaacccgacagaggagcgcaaacaggtctattacatcgaccgtaaatccagttcggacgatgaaaccgtggagtttgagctttccagcccggcagacctgcgcggacagctcatccccacgaggcagatccagcccatgtgcacctggtgcatgcgcggctggtacaaaaccgggaatggttgcacgtatgccgggcagaatggctggtttgataaggacggaaacccggtcgacgatccttcgaaagatgtgtgctcaggcctgctgtccaccgggtgcaagccgcggttcggcgccaacaatgaactcgactacggcggctttccgggtgcgtcacttctgagggggtaa

SEQ ID NO: 864 - DNA, 756 bp, Kosakonia cowanii
  source 1..756: mol_type = genomic DNA
atgagtttaaacagtgattaccagaagcttgaacccggtgatgaggtcaggctttttgaggtcgacggcacgtcctttggtacaggcgaagttctgcgttttcacagctacagcctcgcgcataccgaggcagaaattgccgctgccggcgggaatgaaaataagctgccggcaaaatcagtctggtggcagggagaagaatataaagcgtggccctgcaggattgagggcattgaggcatctaccagcgggagcagcgcgcagcctaaattatcagtagcgaacctcgacagttccatcacagccctgtgtctggcctatgacgatctgttgcaggcgaaagtgactatccacgataccctgggcaagtaccttgatgctaaaaactttgatggcggcaacctttcagccgatccgacgcaggaaaaactgaaggttttctatatcgatgcaaagagcagcgaaaccaatgaagtggttgagtttacgctctccagcccgatggatctgcaggggctgatgataccgacgcgccagctccattctctgtgcacctggtgcatccggaataagtaccgcaccggagacggatgtgactatgccggtacgcgctatttcgacaaaaacaacaacccggtaagcgatccgtcgctggatgagtgcaacggtacactgacggcctgcaaacttcggttcggtgaaaataacgaactctcgtttggtggctttccgggcacatcgttgatcaggagctga

SEQ ID NO: 865 - DNA, 600 bp, Kosakonia cowanii
  source 1..600: mol_type = genomic DNA
atggcgcgtttaaccactattcgcctgtatggcgcgctgggcgcccggttcgggcgagtgcataagctggcggtgcagacatccgccgaagcggtaaaggccctgtgcatcaacttcgacgggctggaagactacctgatgagcgccaaaaagaacggtatgaccttcgccgtgtttcgtggaaagcgcaacataggcgtgcaggatttccaggggctggctggtaaaaatgatattcgtattgcgccggttatggagggggcgaagaaggcgggtatgttccagaccattctgggggcagtgatggtggtcgccggtattatcgtcggcgtggcgaccggctggaccggtgtaggtctcacctttggtgccgggcttatcatgtcaggcgcatcaatgatggccggcggcatttaccagatgctttctccacagcctaaagggctacagggacgcgacgaccctgacaacaaaccaagttacgccttcggcggttcggttaacactctggcgatgggtaatccggtggcgccactttggggtgagcgggaaattggcggtgcgatcatcagcgccggcatagtcgcggaagacatttga

SEQ ID NO: 866 - DNA, 600 bp, Kosakonia cowanii
  source 1..600: mol_type = genomic DNA
atggaaaaacggactgttatcaaactgagcggatcgatggcgcagcgcttcgggcgcacgcaccgccgggtactgtcctctgccagcgaggttttcagggcgctgtccagcacggtggacggctttgatgattatctccgcgaggcgcgcgccagggggctcgatttcgtcatcttccgtgatcgccgtaatatcagccaggaagagttttcgcttctcggtccgggcgatgagctgcgcattatcccggtgatccgcggcagcaagcgtgccggcatcttccaggcggtgctcggcgttgccctgattgccggagggatcgccctcggccctgccggagcgggactcatcgggaaaggcgctgcgctgaatatcgcccttgttggtgcgtccatgtcgctgggtggtgtggtgcagctgctgtcgccgcaggtggctggattgaggatgcgtcaggacccggataacaagccctcctatgcgttcggtggcccggtcaacaccacagccagcggcaacccggtaccgcttctctacggccagcgggagatcgggggcgctattatttcagccggtatttatgcggaagatcagcaataa

SEQ ID NO: 867 - DNA, 603 bp, Kosakonia cowanii
  source 1..603: mol_type = genomic DNA
atgaacgaaataatgactcaaattgaattgagtggagtattaggaaagatctttgggaaaaaacatcaacgtataatttcaaccccacttgaagctggtaaagctttagctgcaaccatcaaaggttttgaacaatacatgataagcagcaagagtcggggtttgacctatgcaatatttaaagataaaaaaaacataggaatagatgatctaggttacccggttacaggggaggtaattagaatcgtccccgttattattggtagtaaaaaggcagggttattgcaaactatccttggtgttgtgattgtggccgcagctgttatttccggaccagtgggtttggctgcattatcaggagcccaagcgtttagcattggagctattggtgcttcgatggctttaggtggagttatccaaatgctttctcctcagcctactgggttagccagtaaacagagcgcagataaccgcgcatcctacgctttcggtggagttacaaacactgcagcacagggctacccggtaccgctcctttatggacgccggcggataggcggggcgattatttccgccggaatttacgtcgaagatcagcagtaa

SEQ ID NO: 868 - DNA, 804 bp, Kosakonia cowanii
  source 1..804: mol_type = genomic DNA
atgaaacttgaatcttcactaaaacacttcagccctcaggggatgaatatcagcgacagcgttaaaggcacctctcctgacaggctgaccggtacagatgtaatggcagcgattggcaccaccagcagccgcgcgcgcttcggtcttgctgcgttctttggaaaagccgggatcagcaaaacggatgagcaaatcgcagtgcaggcgttggtgcggcactcgatggaagttgccccgaagaatgtgcgtaaagcagctggtggcgagtttggttggtgcatgcaggtgctggcgcagtttgcctttgctgaatatgcccgctcggcagccagcagcagcacctgcaccacctgcagcggtacggggtttttctcccgcattgaggatgtgatcaaacatccgggcattctcgattctgacggtgtcgagctggttgccccgaagattaagcatgagcaggtaaaacatgcatgcacagcctgtggcggtaagggcatcattcctgcgcgctgccgctgtggcggtaaaggagaagtccttgatcgtgtggcaacgaaagaacggggcgcgccggtattcaaaacctgtgagcgatgctccggcaatggcttctcttcagtaccatcaacggctgcacacaaggctattacccggcgcttgccagatttgcatgtcaggacatggacccgcaactggaagccatttcttgagtcgctggtgggggtatgtcagcaggaagaggccaaagctgaaaaagagtttcagtctgcaaccagctttcatgacgaagggaataaaatttag

SEQ ID NO: 869 - DNA, 759 bp, Kosakonia cowanii
  source 1..759: mol_type = genomic DNA
atgaacctcgaatcattaccgaaattttattccccgaaatcaccgaagcttaacgatcagacgccagcgaccggcggtgtcgcgctgactatcaccgatgtaatggcagcacagggcatggtgcagtcgaaagccagtctcggttttaatctcttcctggcgaaaatggggattcaggatccggcacctgctattgatgggctgatgcaatatgctctggcgctgaaaaatccggtgctggggaagctgagtgagaaggctcgcggtgaagttctgccggtgctggtgcagtttgcttacgcagattattcgcgttcggcagccagtaaatcgacctgcccacattgcgaagggaaaggcgtgatgcgggaaatgcaggacgtggttaagcaccctggcgttaatggcgtagaggcaacggttaagcacgaagccgtagaagtgatgtgccagcactgcgagggcaaaggagaggtgggcacggcctgccgcggctgtaaaggtaaggggaccgtgctggatgagaagagaaccaaactccacggcgcaccagtcaggaaagtttgcggtcgttgcaacggaaaccgcttcagccgtttgcctacaacccttgcgcgggcgcgcattgagaagattattcccgatctgacaagttaccagtggtacagcggctatggcgatgtaatcgcgctactggtgacaaaatgctggcaggaagaggcttttgctgaggcgcaacttcgtaaagtcacaagatag

SEQ ID NO: 870 - DNA, 594 bp, Kosakonia cowanii
  source 1..594: mol_type = genomic DNA
atggggattcaggatccggcacctgctatcaatgggctgatgcaatatgcgctggcgctgaaaaatccggtgctggggaagctgagtgagaaggctcgcggtgaagttctgccggtgcttgtgcagtttgcttacgcagattattcgcgttcggcagccagtaaatcgacctgcccacattgcgaagggaaaggcgtggtgcgggaaatgcaggacgtggttaagcaccccggcgttaatggcatagaggcaacggttaagcacgaagccgtagaagtgatgcgccagcactgcgcgggaaaaggagaggtgggcacggcctgccgcggctgtaaaggtaaggggaccgttctggatgagaagagaaccaaactcctcggtgcaccagtaaggaaagtttgcggtcgttgcaacggcaaccgcttcagccgtttgcctaccacactggcgcgggcgcgcattgagaagattattcccgatctgacgagctaccagtggtacaagggctacggcgatatcatcgcgctactggtgacaaaatgctggcaggaagaagcttttgccgagttgcagctgcaaaaagtcacaagatag

SEQ ID NO: 871 - DNA, 1083 bp, Kosakonia cowanii
  source 1..1083: mol_type = genomic DNA
atgcagaggccagcccgttacgacgctaacctgccccgtaacctgacctttcgcaagagagataagctttattcctggcgtaacccaataaccggccaggtaatctatctgggccgcattgatcgcagggaagcgatagcccaggccattgaagccaacagctatcttgatcagaactatatcccctccagtctacttcagcgcattaaagaaacgcccaccctgactatggctaaatggctggagaggtatgacgtaattctcgagcgaagggaattaaaaccaaacacaatgaaagttcgcagaaatcagatggagacgatcagaaaagagttcggcaccatcgctcttagcgcagtgacaacaaaagacattgcggaatttttggaaacatacattgcctgcgataaaaaaagcatggctgcaggtctgagatctgtactactcgatgttttcagagaggcgcttgtggaaggccatatagaaaggaacccggcagaacctactcgcaccccggcaccaaaagttaagcgggaacgtctaatgctcgaagcgtattttacgatacgagaaacagcagctgctaattcagtatgggcggcaaatgcatttgatcttgcgctggtcacggctcagcgacgcgaggatatagccatgatgaaattcactgacatccgggaagacagattgtttgtcatacaggagaaaacagggaataaattagccatccctttagacctgaaactcgaagcggccaatcttcatttaaaagaagtgatagaacgttgcagagtgaacaatccatctgagttcctgctttactcgccggtgcgtcggggtggaagaaagcccggaccactgacgccggatgggttaacccaggcattttcagatacccgtgatatcactgtgttgaaatttggcccttacccgccgtcgtttcacgaaattagaagtctggccagtaggctttatgagaaggaaaaaggcgaagaatttgcgcagcggcttttgggtcataaaaatttatcaatgaccaaaaaatacttggactcccgtggggctgagtatgttagggtttag

SEQ ID NO: 872 - DNA, 1146 bp, Kosakonia cowanii
  source 1..1146: mol_type = genomic DNA
atggctgctagaccacgttcacataaaatctcagtacctaacctttactgcaagctggataaacgcacggggaaaatatattggcaatataagcatcccctttccggacgcttccatagccttggaactgatgaggccgaggcaaagcaagttgccacagaagcaaatatgattattgcggaacagcgcacccgccagattctaagcgtgaatgaccgactggccaggatgaaaggcaagagaaccgatatcacggttacagagtggctggacaaatatatggccattcaagaagaacgactcaaacacaatgaattacgtccaaattctttcaagcaaaaaaataaaccagttcgtctgttccgtgaacattgcggtttgcaacacttgaaggatattaccaccctcgatattgccgagatcactgatgcgataaaagcggaaggtcataaccgcatggcgcaagttgtgcgtttggtgttgatagacgtctttaaagaagcgcagcacagcggccatgtaccacccggatataaccctgcgcaggcaactaagcagccgagaaataaagtcaccagacaacgactttccctggatgaatggaagaagatctacaccagtgctgaacaacaagagccttatcttcagtgcgggatgttgctggctttgattacaggccaacgtttgggagatatctgtaacatgcaatttaaagatatttgggatgatatgctgcatgtagaacaggaaaaaacaggctcgaggctggcgatacctttggatttgaaatgtgatgtgttaggtctaactctaagggacgttatttcgaagtgtcgcgacgctgttatcagtaaatatctggtgcatttcaggcatacatctgcccaagcaactagaggagataaggtttctacaagttcactaacaaccacttttagaaaggcgcgagataaaagtggtcttaattgggataaaggtactgctcctactttccatgagcaacgttctttatcggaacggttatacagagaacagggtgtagatacgcaaaaactcttggggcataaaacacagaaaatgacggacagatataatgatgaccgagggaaagactgggtggtagtgagcgcaaagacagggtcgtga

SEQ ID NO: 873 - DNA, 252 bp, Kosakonia cowanii
  source 1..252: mol_type = genomic DNA
atgaaaataattaacgctgcggcggttgtgctgttttcgatactggcgacaggctgcgccagcaacacgccgccgctgtgctataacggggcggtggtgatgaaaaaccgggtgtcggttccggtattcggcataagaaaaccggtcagcacccccgaatatctctccggcggcagcttcggttatcagtgggttgagcggagcgcttttacggatacctcgacctgcgacaggctgccgctgacggagtga

SEQ ID NO: 874 - DNA, 240 bp, Kosakonia cowanii
  source 1..240: mol_type = genomic DNA
atgaaaataattaacgctgcggcggttgtggtgttttcgatactggcgacaggctgcgccagcaacacgcccccactgtgctataacggggcggtggtgatgaaaaaccgggtgtcggttccggtattcggcataagaaaaccggtcagcaccaccgaatatctctccggcggcagcttcggttatcagtgggttgagcggagtgcttttacggatacctcgtcctgcgacaggctgccg

SEQ ID NO: 875 - DNA, 954 bp, Kosakonia cowanii
  source 1..954: mol_type = genomic DNA
atgcagatgtttattgcaggtaccagctttgacgccatcaacgccatggcggccagttatgttctggatgtcattaccatcaccggtgccgggagtaagacctactcccttgccggggtggaactgacgtatgcaatcgtgaatgactttatgggagggcagtttaccggggcaacctacagcgtcagtgtcagcggcttgacggtatcatggaacgtaaataacgccgtcaccctgattgtgtacggcagcccggtggcgggcacacagagtgactactttggctttcagctcttccagtacctgaacggggtgaggacggtcaaactggcacctaattatgtcccgttttgcctgcgagaaatcatcgatgtgcctgccggcgcacgaacggtgcagacgcaggttccggcgggtaacccggtcatgtgttttcaccggcacaccggggcggcaatggacatcagctggtggaagcccgccacggccaacgggtatcacgcgctgcagtttcccacggatggcagcaatcagaccgggtgcagggtgtatgtgttttcgaatattcttgcgaacattcctgattacgggttctacctctaccgcgacgggcagatggtctggcacagcaactgtcttccccttcaggttataccgctgacgaacggggatataaccagcgacacgccgctggcggtatcttccagcgtcacggcgcacatcttcgtgccgcaggacccggcttatccgacggggtacagcaattttatgtgtgcatcagcgggaaatgacgggacccgttataaggtgcaggtgggaaaagtattccagagcacctttatcagcagtcccgatgagggcaggcgaatgcgggggtgggcatctggcggggtggggtatatcgaaacgcagttctatgaccagtactacaaatatgcccttggcctggcctga

SEQ ID NO: 876 - DNA, 954 bp, Kosakonia cowanii
  source 1..954: mol_type = genomic DNA
atgcagatgtttattgcaggtaccagctttgacgccatcaacgccatggcggcaagctacgttctggatgtcatcaccattaccggcaccgggagtaaaacctactccctgcccggtgtggaactgacgtatgccatcgtgaatgactttatgggagggcagttaaccggggcaacctacagcgtcagtgtcagcggcttaaccgtgtcgtggaacgtcaataatgccgtcaccctgattgtgtacggcagcccggtggcgggtacgcagagtgactattttggctttcagctcttccagtacctgaacggggtgaggacggtcaaactggccccaaattatgtcccgttgtgcctgcgggaaatcatcgatgtgcctgccggcgcgcgcactgtgcagacgcaggttccggcgggaaacccggtcatgtgctttcaccggcacaccggggcggagatggatatctgctggtggaagcccgccacggccaacgggtatcacgcgctgcagtttcccacggacggcagcaatcagaccgggtgcagggtgtatgtgttttcggatattctcacgaacatacctgatcacgggttctatctctatcgcgacgggcagatggtctggcacagcaactgccttcccctccaggttataccgctgacgaacggggatatcaccagcgacacgccgctggcggtatcttccagcgtcacggcacacatcttcgtgccgcaggacccggcttatccgacggggtacagcaatttcatgtgtgcatcagcgggaaatgacgggacccggtataaggtgcaggtgggaaaagtattccagagcacttatatcagcaaccccgacgagggcaggcgaatgcgggggtgggcatgtggcggggtggggtatatcgaaacgcagttctatgaccagtactacagatatgcccttggcctggcctga

SEQ ID NO: 877 - DNA, 954 bp, Kosakonia cowanii
  source 1..954: mol_type = genomic DNA
atgcagatgtttattgcaggtaccagctttgacgccatcaacgccatggcggccagttatgttctggatgtcatcaccatcaccggtaccgggagtaaaacctactccctgccaggtgtggaactgacgtatgccatcgtgaatgactttatgggagggcagttaaccggggcaacctacagcgtcagtgtcagcggattaaccgtgtcgtggaacgtaaataacgccgtcaccctcattgtgtacggcagcccggtggcgggcacacagagtgactactttggctttcagctcttccagtacctgaacggggtgaggacggtcaaactggcgcccaattatgtcccgttatgcctgcgggaaatcatcgatgtgcctgccggcgcacgcactgtgcagacgcaggttcctgcgggaaacccgatcatgtgctttcaccggcatacgggggcggcaatggacatcagctggtggaagcccgccacggccaacggctatcacgcgctgcagtttcccacggacggcagcaatcagaccgggtgccgggtgtatgtgttttcgaatattctcgcgaacatacctgattacgggttctatctctaccgcgacgggcagatggtctggcacagcaactgccttcctcttcaggttaacccgctgacgaacggggatatcaccagcgatacgccgctggcggtatcgtccagcgtcacggcacacatcttcgtgccacaggacccggcttatccgacggggtacagcaatttcatgtgtgcatcagcaggaaatgacgggacccgttataaggtgcaggtgggaaaagttttccagagcacctttatcagcagtcccgatgagggcaggcgaatgcgggggtgggcatgtggcggggtggggtatatcgaaacgcagttctatgatcagtactataaatatgcccttggcctggcctga

SEQ ID NO: 878 - DNA, 360 bp, Kosakonia cowanii
  source 1..360: mol_type = genomic DNA
atgaaacgtatgccggacaaagacgctggtttctgggcaggtcttatcgcctggctatacagccacaaaacagaatggggatatgcgggcgttgcgggcatgttttctttgctgcgcagcgcctatgcacagtcttcatggagtaagcgtgtcctcgacgccgtatcttgcagcgccctggcattcttcgccgcgccgacgcttcaggtggtcgggggcgttcttaactggaacgtgcctgatacagccgctcaggttttagcggtgtacatcgggtatgtcggcaatgactacatcagcgagaagctgcgcggatggattagccgcagaacgggagataacagtgaaaatcagtcctga

SEQ ID NO: 879 - DNA, 360 bp, Kosakonia cowanii
  source 1..360: mol_type = genomic DNA
atgaaacgtatgccggacaaagacgctggtttctgggcaagtcttatcgcctggctatacagccacaaaacagaatggggatatgcaggtgtggcgggcatgttttctctgctgcgaagcgcctatgcacagtcctcatggagtaagcgtgttcttgacgccgtatcgtgcagcgcgctggcattctttgccgccccgacgcttcaggtggttggtggcgtccttaactggaacgtgcccgatacagccgctcaggtgtttgcggtgtacatcgggtatgtcggcaatgactacatcagcgagaaattgcgcgggtggattagccgcagaacgggagataacagtgaaaatcagtcctga

SEQ ID NO: 880 - DNA, 1008 bp, Kosakonia cowanii
  source 1..1008: mol_type = genomic DNA
atggcaaagccggactggggagacctacaacgtcggttcctgtctgagcacgccaaaagcggtgtatcgccaaaagaatggtgtgaagcgcagggactgaattattcatctgcgcgccggtacattaaaaagcacgcagcgcaaagtgcgcaaaaatctgcgcagaaaaaagtgcgcaatgcgcagaaggaaaaagacgttaatgcactggttgaaaacgacggattgacagcgcagcagcgaatctttgtggcggaatacttgaaagaccgcaacgccacccaggccgctatacgtgccggatacagtgcaaagactgctgagcaaattggttatcagctccttcagaaaacttcagttgccgttgctattgagaaacagcaaaaggcctccctgatgcgaacgcttgccagtgctgatgaggtgctggcacagatgtggcagctcgctacttttgacgcaaacgagctctcgcaatatcgccgtggtgcgtgccgctactgtcatggcttcggccataactatcaatggcgcgatatggttgagtttgaagagcatcggcttaaagcaatcgagaaaaagggtaaagagcctgtggacgttggcggttacggctatgaccacaaccgggaacctaacccggcatgccctcgctgtaatggtgacggcatcggccagccgtatttcgctgatacccgtaagctgccgcctgtttcccgtctggcgtattccggcatcaagctcggtaaaaacggcgttgagattacagctatcagccgtgagcgcatgtatgaagccgtgatgaagcggcttggcctggcggatagcgagtttgcgcagcagctgcagcagatcgaaatcgaacgtcgccagctggaagtggaaagactccgcaaagagctggcagcagatccggaagatgaggtaccgatgcccgtggcaataaacattaacgtcgcggatgctcgcgtaaggaaagacgatgacggggatatcgccgacccttaa

SEQ ID NO: 881 - DNA, 453 bp, Kosakonia cowanii
  source 1..453: mol_type = genomic DNA
atgaacctgatcaacctcatcaagaactactcacacgtcattgttatcggtctgatttgcgtggcgctgtgggggctgaatacccgtaacgcccagttaacagccactaatgagcggctggaaaagctggcgaacagcaaagacgaccagattaacgatctgcgctcaaagaatgacggtctggccgccagcgtgggcgagctggtcaccgccgtcaggcagcagaacgaagtgatgagtcaggtcactgaacagcgagctgtaaccgcacagcagaaccggaagctacagaatgaaattaagcaataccttgaagctgataagtgtgcccagtctcgcgtgcctgacaatgctgctgaccggctgcgtgccgcagcaaaagccgctggtggagtaccggacaataagccacccgcaaatcagcctgccggcagaactgacatcccgcattga

SEQ ID NO: 882 - DNA, 453 bp, Kosakonia cowanii
  source 1..453: mol_type = genomic DNA
atgaacccgatcaacttcataaagaactattcgcacatcatcgttatcggcctgatttgcgtggcgctgtgggggctgaatgcccgtaacgcccagttaactgccaccaatgagcggctggaaaagctggcgaacagtaaagacgaccagattaacgatctgcgatcgaaaaatgacggcctggccgccagcgcgggcgagctggtcaccgccgtcaggcagcagaacgaagtgatgagtcaagtcactgaacagcgggctgtaaccgcacagcagaaccggaagctacagaatgaaattaagcaataccttgagactgataagtgtgcccagtctcgcgtgcctgataacgctgctgaccggctgcgcgccgcagcaaaagccgcaggtggagtaccgaacaataagccagccgcaaatcagccttccggcagagctgacctcccgcattga

SEQ ID NO: 883 - DNA, 1077 bp, Kosakonia cowanii
  source 1..1077: mol_type = genomic DNA
atgcagaacacaaacgtagcattagccgaccagaacactgtcgttaactcaaacatcgcgctgttcgattcacagtaccttaatgccatcagcactttcgcccagattatggcgcagggtgcggcgacagtaccgaaacaccttcagggcaaccaggccgactgtatggccgttgcaatgcaggcggcgcagtggcaaatgaaccctttcgccgtggcgcagaaaacccatctgattaacggcgtgctgggatatgaggcccagctggtaaacgcagtgatttcacgcagcggcgtgctggcgaatcgctttgagtatgagtggtacggcccatgggaaaaagtggtcggaaaatttcacatccgcaaaggtgaaaaaggcgaataccgggtgccgggctggaccatggcggacgaagcaggtatcggcattatcatccgcgcaacgctcaaaggcgaagatcacccccgtgagctggatctgctgctggctcaggcccgcacccgtaattcgacactgtgggctgacgatccccgccagcaactcgcctatctggcagtaaaacgctgggcgcgtctgttctgtccggatgtgatcctgggcgtttacacacccgatgagcttgaagatcgtcaggaaaaagaaatcaacccagcaccgcagcagcgcgtaagcgttgctgatatcccggctgaatcgacaactaacagcgcgcaagagtccggtaccaatattgatggcatggccgacgagttccgcgatcgcattgaagcagctcaatccgtggacaaggccaaagccgtgcgggtggatatcgaagcggccaaacctactctcggttcggcgctgttcactgagctgaaaaacaaagccgtacggcgctactacctggtagacgcccgcaacaaggtggaagcggcgatcaactccctgccccagcctgacgaaccggatgctgcagagcagttcaccaaagcagagcaggcactggctgctgcgaagcgccatctgggcgatgagctgtatgaccagtttgccgttaccctgctcgatatgaagcccgaatacgtggcatga

SEQ ID NO: 884 - DNA, 639 bp, Kosakonia cowanii
  source 1..639: mol_type = genomic DNA
atggcaaagcaaggcgtggggtcgaacatgactaagaaaccccgtcgtaaatgcgcgaacctgagctgtcgccagtggttcaacccggtccgcgaagggcaggtggtttgcagcttcgagtgcgccagcgccatcggcaaagaacagacagcaaaagcccgtgaagccgctaagcagaaggaactacagcggcagcgcgctgaagagaaggctggccgtcagcggcgcgcggcacgtcgtaaggagctgaagccgatccggcactgggtgcagatgactcagcgtgctttcaatgactggcggcgcgaaatgctgctggccgccgggcacgcatgcatctcttgcggtaccaaaaccgcttttgcctggcatgccgggcattaccgcaccacggccgcagcaccgcaacttcgctttaatccggacaatatatggctccagtgctccgcttgtaacgtccacaaatcaggcaacatcgaggcataccgcgtcgctcttgtcgggctgatcggcgaaaagcgcgtgctgacgctcgagtccaacaacgaaacccaccgatacacccgggaagaactggacggcatccgcgccaaggccagggcagaacttcgagtattgaaacagcaggaggctgcatga

SEQ ID NO: 885 - DNA, 3396 bp, Kosakonia cowanii
  source 1..3396: mol_type = genomic DNA
atggaatttttctacttaatcaaggcaacgcagaagtcagggaaacctgacggcgttatctggttcagtgccaaaaccgaagcacgtgccgccctgacgctcgatgttaagctggaagatacaggcatcgaaactggcagaggcaaagactacgccaaaccgatccgcaccgattttccggttgttaacgacctgcctggagaaggcgtcgtcgacttcacctggtgcgatcgctatcaactggctgacgaccagcgtacctggaacgtgatccccggcgccgggccacaggatgaaaccgacctttccccggccagcaccatcaacgatgcagatctgcatgccacgccggtgacgtccatggataccgttgatgcgggcaacacctcccagcttgaaaatcgcaccccgtctgtccgcttcgccgtccatctgctgggcgacaaataccattcggagatcagccaagaacagcagatcgtcgccaacgaattggctatggatgaggcaaatgtgtatttccagaacctgctgcaggccaaaaatgaagttcctgatatgagcgaactaagccttcacgctgagtggaaactggtgcaggctgtcaaagacgttttcccgcagcataaagaacacgaacccgcgctgctggctgctttcatgtcgagctgggtgaaagcagagatcggcgaacgtgcccaactggtcgaaaactggcttagcggcaaactgcccgcccctcaactcgccgataccagtgaacctggtgatgatgcgcctgtttccaatgcagaagctcaacaggatgctacgcccgaagaggttgcccaggctcatgttcaggcatttcgcgatagggacattaccgaactgcacgctgttcctaagctgtcgttccgtcaccgcctcctcgcgcagtttattaccgagaaggaatacgcttaccacatcgacaatgaacaactgaatactgtgcgccagctggaaatggacaccgataactcctacgtgcaaaacctgctgctggccgccgagaatgtcgaggggatgaaaaagcttcgtgacttcgagttctggaggcttaccgatgctgttaagcgcgtttttccttctgacaaagcgacgcctgatctatccctgatgctccagttcatgaaggcatggaaaacaacggactatatcgatcgcggcctgctcgctaaggaatggattaacggtaaccgggtttcaaccattcatcgcaccgacactggcactaacgcgggcagcggcatcaaaacagaccgtaatgcagactatgagcatacgttggacacactggatattgagatcgcctgtgctactctgccgatggattttgatatctacaatatccccggctccattcaccgccgggctaaagacattgttgctgcaaaagaaagtccctggaaggagtggtccgcagcactgcgtaaaactgcaggtatcctggattactcgcgcgctgcaatttttgcgctcatccgcgaagcgtcctcaggcataacaacgttcccggatcgcatgactggctatatcagcgcgactctcaatgaatacaagcatgatacacctgaggccagaatcctcgccgctgcgcgtcagattgatagcgcggccgtggatgccggagtcattcagggcaccgagccgtcacaccagctcgtcgccccccctcagccagaagtatccaacctcggcggcggcatgttctccatagattgtctgctggatgaaaaagcaaccccggtcatcaataccccctcaaacgaagtcgcaaaacaggaagtggagatcgtttgcagtgtgcagatggaagagactgacccgagcaaagtcgaagctggtaatccgttaccagcagtcgaagtcgctaatgaagctgctgcacaaacaattagcgtaagcccggcggatatcctcgccgctgccacaccagaactgacgcgcaacgttgtccccgatctggaccagaatattgatgctcttagccaggatgagccggaattacctccaaccgaaccagaaatgacagaaatagaaccggtagcggatatttccgagccagaggctgctgctaaggaatggccagcttacttcgagccaggccgttatgaaggtctgccgaatgacgtttaccatgccgcgaacggcatcagcagcacccaggtgaaggatgcccgtgtctccctgatgtatttcgaagcgcgccacgtctctaggaccatccagaaggagcggtcgaaggttctcgacatgggcaatctggtgcatgcgcttgcgctgcagccggagacgctggccgccgagttcagcattgagccggagatcccggaaggtgcactcaccaccacggcgacgatccgcgagtgcattgacgagtacaacgccagtctgccgccgcagctgagcgctgatgatatcaaagcgctgctggaggcccataacgccaccctgcccgcgccgctgccgctgggcgcagcagtagacgaaaccgcagaaagctatatggagctgccggaagagttccagcgcatcgagtctgataagaagcagaccgctgcagctatgaaagcctgtatcaaagagtacaacgccaccctgcccgcttcggtgaaaacaagcggcacccgtgacgcactcctcgagcagttggcaatcattaatcccgacctggtagcgcaggaagcgcagaaaccgtcaccgctgaaagtgtccggtaccaaaacggatctgattcaggctctcaaggcggtccgtccggatgccgtattcgccgacgagttgctggatgcctggcgcgagaacccggaagccaaggtgctggtgacctgccagcagctggaaaccgcgctggctatccagaaagcgctgcatgcgcacccgaccgcagggaaactgctgcagcatcctgatcgcgccattgagacgagctatttcggcatcgacgaagagaccggcctcgaaatccgtgtgcgccctgaccttgagctggacgtagatggcgtgcgcatcggtgccgacctcaaaacgatttctatgtggaacatcaagcagtcaggtctgcgggcgaagctgcaccgtgaaatcatcgatcgcgattaccacctgagcgccggtatgtacatggagacggcaagcctcgaccagttcttctggatcttcgtcaacaaggacgaggggtatcactggattgccattgttgaggcttcgcaggagttggtggagctgggcatcctggagtaccgcgcaacgatgcgcgccattgccaacgcattcgatactggcgagtggccagcgccgatcaccaccgactacaccgacgaacttaccgagtacgatctgcgccgccttgaagcgctgcgcgcggcttaa

SEQ ID NO: 886 - DNA, 270 bp, Kosakonia cowanii
  source 1..270: mol_type = genomic DNA
atggcaaagcttcttaatttgcaggaatgggccgctgaagtgtattcatcaccgccatcgctttctactcttcgcagatgggtacgtgaaggcaagatctatcctgcccccgagctacacggtaaagagtataagctccgcccggatgctatctatgttgatccgagcaagaagaatttgcgcttaaaaccgcagcatctaaaaattccgtccaaagggactttactggagagattacagaatgcagaggccagcccgttacgacgctaa

SEQ ID NO: 887 - DNA, 165 bp, Kosakonia cowanii
  source 1..165: mol_type = genomic DNA
atgggcacgcagtggcgcacgggaatgggcggcatcacagggctggattacaacgtgctgccctggctgatgaagctgaacggggtggaggatgaggcaaccgcgttaacggatatccgcgtaatggaaagcgcggcgctgaagattatgcatcagggggcgtaa

SEQ ID NO: 888 - DNA, 678 bp, Kosakonia cowanii
  source 1..678: mol_type = genomic DNA
atgggcttcgcattacctaatggcgccacggtatttgtcggctcgaaactcggcacgcctgtggcggtgacgagcgtcagcaatgccgcaggcgctgtatttaccgttgcaagcggccacggcctcgctgtaggcgatgtggtgctggtttccagtggctgggcactgattgacagcctggttgcgcgcgtcacggcgcagacgaccaccagcgtgacgatcggggtgattaacagcaccgataccaacttcttcccggctggctccggcacaggttccttaagcaaagtagccgagtggactgagatcccgcagatcaccgaagtttcacagtccggcggtgaccagcagtacacgcagatccagttccttgccgatgaccgccagcgcaacctggcgacctacaaggcggccaagtcgcagacctttacggttgcgcatgactccacgctgcctatctatgccgtgctgtcagctgctgaccgttccggtgacacgctgccgctgcgcatgtacgtgccgaaggcgaaggaaacgcgttactggtcgggtaagccgtctttcgatccgcagccaaccactgcgccgaatgccgtcgagacggtacagccagcgtttgccatccagtcccgcgatatcaccttttacaaagatactgccccgcaggcagccgcttaa

SEQ ID NO: 889 - DNA, 609 bp, Kosakonia cowanii
  source 1..609: mol_type = genomic DNA
atggcagataaccaggcgtttatggtgtccattaatgcgttcgtcagccaggcaaaggagcgacaggagaaagtggtgcgggtggtcggcatcaaaatcctggcgcggctggtgcagatgtcgcctgtcggcaatccagagctttgggcggtgaaccagacggcggcggcctataacgcggcggtctccgagcataacagtctgctgcggcaaaacccggacaacctgactaaagcagggcggctgcggccaggccgcaaagttaaggacggcatggatatcaaggcaccgcctggctacaccggggggcgctttcgcggtaactggcaggtgtcgtttgaccagcgcgccgttggcgagaccgggcgcatcgacaaggctggccacgagacgctcaccgcaggcaacctggtactggagcagttcaaagtcggtaccacggctatctatttctgtaataacgtcccgtacgcctaccgtctggagatgggacattccagccaagcgcccggcggcatggtgcgcatcaccgccgccgagttccagcggtacttcagcgaggcagtcagcgaggttaaaaatgataccggacatcacaacggcgcttga

SEQ ID NO: 890 - DNA, 483 bp, Kosakonia cowanii
  source 1..483: mol_type = genomic DNA
atgatcattaccgatatcacttcaccggccatgaacagctatgcaggcgagggggatttgaaaggctttgccgatctgcgcgatatcacgctgccggaaaagctcgcgccattgctcatccgggcgatggattaccttgaggggctggactgggccggctggcgaagcgaaccaaagcagccgctggcgtggccgcgcgcgggcatcgaactggacggatacgaactgcccgccggagaggtaccgcgtcaggttgttactgcgcaatgcatgctggcggtcgaggcgatggatggcgatctgctgggcagtgtgcgagaagcagctgtgaagtccgagcgcgtggagggagccgtaaccacgacgtatgccgtcgctgacggcgaagtgttcagaccgtcttacccggcggtgatggctttgctcggcgagctggctgctggtcgtggctatgcagtaaacgcttttgcggagcgtgcgtaa

SEQ ID NO: 891 - DNA, 690 bp, Kosakonia cowanii
  source 1..690: mol_type = genomic DNA
atgaaccacgaactgtttcatgcagtacagagccgcgacgtcgaaatgttggcgcgcatggctggcagcagccgcgaacagaccaaggtgatcaacagcgacgccgagcgcatggtggatctccttttcagccaactcaagcaggtttttccggcatccacgcagaccaacctgcgcagtgaggcggatgagcgtacggctaaacagcagtggattgccacgttcgccgaaaacggcatccgcagccgcgaacagctggtggcggggatgaagaaggcgcgagccagtgtttcaccgttctggccgtcgccggggcagttcgtggcctggtgccgtgagggcaagggtctgttaggtgtcagcccggcggatgtcatgaccgagttttggaagtggcggaagcttgttttcaaatatcccaccagcgagcaatacccgtggccacagccgcttctgtatcacgtttgtctggagttgcgccgcaggggcgttgatcgccagatgaacgagaaagagctgctcagtgaagccgggcatctgctggcgcactgggaaaagcgcgttgcagaaggtaagccgatcccgccggtccgccgtgcactggcagcaccgaacgaggaccgggggccgacgcccgcagaaatgctgatggccgagtacaagcgccgccaggcgcaggggagggtttga

SEQ ID NO: 892 - DNA, 312 bp, Kosakonia cowanii
  source 1..312: mol_type = genomic DNA
atggccactaaatttcaactccagcccaaaccgactttcaaagcagacgtcaccattccgcgcgctggcgaagatgatggcgtacttacgtttaccttccgtcataaaccggtcaaagaacttgctgcactggaagaaatcgagggaaaaacggctatcgacttcctgactgaaatcaccgagtcctgggcactaccggatgagttcagtcgtgaaaatctggagatgctcctggataactaccccggcgcgatgaaagctatcgtcggcacctactatcgagagctgacaggtaaccgagaaaaaaactga

SEQ ID NO: 893 - DNA, 411 bp, Kosakonia cowanii
  source 1..411: mol_type = genomic DNA
atgataccggacatcacaacggcgcttgaggccatgctgggtctgtgggcagacggcgagggcgtgcgggtggcgtgggataacattcagttcgatccgcctgtcgacgggttgtatctgatctcccatgatatgcccgcgcagccgtacagcattgatatggccgggggctgccaggtctaccccggcgtgtatcaggtcaccgtcgtcgcgccagcgggtggcggcaaatcacaggccagagttctggcccaccgcgtcgccgggttgttccctgagaaccaggagatccccggcgacggctttaccgcctgggtgacatcaccgcccgccatttaccccggcataccggacggggtgtcctactccatccctgtcagcatcaactaccgggctgatatctcagcttga

SEQ ID NO: 894 - DNA, 351 bp, Kosakonia cowanii
  source 1..351: mol_type = genomic DNA
atgcctgttaactacacccgcatgaaagccaccagcacgcgcctgctcactgagaacggcgcggcgtacccggtaaagcgcaagggcacagtaacggtcatcggaggcgttgaacatcgtgagccggataagaccttcactgcgatcggcgtgcggactgagtatagacccggcgaaattgacggtacggtcatcataaacggcgacacgcgtattgtgtttactgctgataccgagctgcgcaccggtgacatggtggacgtggacggcagatggtaccgcattgagaagcccaacccggtcaatcctggcaaactgctgttgtgctaccgcgctcagctgagggcataa

SEQ ID NO: 895 - DNA, 771 bp, Kosakonia cowanii
  source 1..771: mol_type = genomic DNA
atgttaatccgaaatatgctcctgaaatactacgcaccagaagatgatggccagggcggcgggggcggcggtaccgaaattacgccagaaattcagaagctgattgatgatcaggtcgctgcccaggtctccggcctgaaaaccaaaaactccgagctgctgggcaccatcaagcagcagaaagacaatctgtctcgctttgacggtatcgacccagatgcggtgcgcggcatcctgcagcgattttctgacgacgaagaggcaaagctgattgccgccgggaaaattgatgaggtgctggataaacgcaccgagcgcctgcgcgctgatgttgataagcagatcaaagcggccaatgaacgcgcggataaagccgaagcgttctccggcaaattccgggatcgcgttctcggtgatgccatccgggcggcagcgtcaaaagctggcgcactggcggaagcatccgatgacctgatcctgcgtgccaaaggcacattccagctcaacgacgaaggcgaggccgtagcagttgatgcaaatggcgacgttctgttcggtaaggacggcaaaaccccattaagcccgcttgaatgggcggagtcgctcaaggagacggccccgcacctgttcccgcgcgctgaaggtaccggcgcgggtggacacaagccaggcggtggtggcagtcagaaacgttcagagatgagcgccagcgataaggcggactatatccgcaagcatggccagcaggccttcctcaagcttccgaaataa

SEQ ID NO: 896 - DNA, 1407 bp, Kosakonia cowanii
  source 1..1407: mol_type = genomic DNA
atggctaataacgacataacctgggttcgtcctgaacaccgggcggccagtgctgcctggaagaaaatcagggacttttgcaaaggggcggaggcggtaaaagaaccgggcaacaactatctgcctttgcttgactccacagacaagagcatgcgcaaccgcaagcgcaacgaagattacctgcagcgggcggtcttctatgcgattactggtaataccaagattggcctcctcgggctggcctttcgaaaggatccgaccttttccgcgccggagaaactgagctatctgttgaagaatgccgacggcgctggcaccagcatttaccagcagtcgcagctggtgaccgagaacgtgctggaggtggcccgtgacgggctttatgtcgattacgctgaaggcagtggccaggccattatcctgcgttatctggccgagaacatcatcaactggcgcacgaagcgcatcaacgggcgcgatcagttggtgctggtggtattgagggaatgtgtggagcaggaggatggctacgcgttcaaggatgaggtccagtatcgcgagcttgcgcttgaagagggccggttcatctgccgggtgtggcgccgcagcgcggatgctggttccgctgcatacgtcgttaccagtgaataccagccgaagcccaaaggcaaagacagctgggacgaaatcccgtttaccttcgtcggcgcgcagaacaacgatccgactatcgacgactcaccactcgccgcgctggtggagataaaccatggtcacttccggaacagtgctgattacgaagacagcgtgtggttctgcggccaggtccagccctacatgacgggacttgatgaaggatggcgcgatcatctggaaaagaagggggttaaaatcggctcccgctcgccgctgctgctgcccagagagggcaactttggttatgcccaggcgcaacccaacatgctggcgaaagaggcaatggacagtaagcgcgactacatggtgcaactgggcgcccggctcatcgagcagaacgcggcggtgaaaaccgcaacacagtccagcagcgagcagacatcgtccacttctgtactggggatctgcgtctcgaacgtatcggaggcctattcactggccatcggctggtgcgcgaaatatctgggcgtcggcgagcagcaggcggcctacgcgatcaaccaggagttcattgctaaggtcgccgagtccggcatggttaccgccattgtgaacgcctggcagtccggtgcaatccgcgacactgatatgattcgtgcgctgcagaagcttgacctcatcaacccagcagacagctccgacgatattattgacgaactgcacaaccccacccccaccctgattggcggtaacaatggcaacggtaaatga

SEQ ID NO: 897 - DNA, 1311 bp, Kosakonia cowanii
  source 1..1311: mol_type = genomic DNA
atgacggggatatcgccgacccttaacgtaccgcaggcgcagtttctggcgatgccgcataaattcaaggcctacgtggcgggcttcggttccggtaaaacgtgggtgggctgcgggggcatctgcaaggggatgtgggaacaccctaagatcaaccagggctacttcgctccgacctatccgcaaatccgcgacatcttctatccgacggttgaggaggtggcgttcgactggggccttaaggtccagatcaacgagagcaataaagaggtccatttctacgccgggaggcagtaccgcggcactaccatctgccgctcaatggagaaaccggccacgattgtcggctttaaaatcggcaacgcgctggtggatgagctcgacgtgatgcccgccctcaaagcgcagcaggcctggcggaaaatcatcgcccgtatgcgctataaggtcgctggactgcgtaacggcattgacgttaccaccacaccggaagggtataagttcgtttatcagcagttcgttaaggcagtgcgcgataagcctgagctggcaaccctgtacggacttgtgcaggcttccacatttgataatgaagcgaacctgcctgatgactatatcccctcgctgctggcgagctatccaccagagctgataaaagcctacctgcgcgggcatttcactaacctgacaagcggcaccatttaccaccagttcgatcgcaggctgaacaactgcacagatgaggagcagccgggcgagccgctgtttatcggcatggacttcaacgtcggtaagatggcagccatcgttcatgtgaagcgtgaagggttgccgcgagcggtgcgggagttggtgaaggtctatgacactccggcgatgatcaaacgcattcaggaagagttctggcgctatgagggcggccgctacgttgccagccgccagatctacatctatccggatgcctccggcgacagccgcaaatccaactgcgccagcctgaccgatattgcccagcttagagaagcggggttcagcgtcatggttaacgcttccaatccgccggtgaaagatcgtatcaactcgatgaacgccatgttctgtaatgcattgggcgaacggcgttacctggttaatgtccagcgctgcccggtctatacggaaagtcttgagcagcaggtatgggataaaaacggcgagccggacaaaaaggcagataacgatcaccccaacgatggtggcgggtatttcattgtgaaggattaccccatcgtcaaacctgcatactcaatcactatggataccaccttctga

SEQ ID NO: 898 - DNA, 834 bp, Kosakonia cowanii
  source 1..834: mol_type = genomic DNA
atggccgacctgtcgaacgggtataccaaggtcgctaacgagatccaacagcttaagccgcgcctgagattgtcaggccgggaatggcagtgttttgaggcggtgatctggcttacctacggctggaacaagaaacaggaccgcgttacgaacacggtgatcgctgagcttacagggttgagtgattcccacgtttctgatgcgctcaaatcgctcgcagaacgcaaaatcatcttcagtcataagcagggagtgatgaaaacggtcggtataaataccgacctttccgcctggattttagacaaaccgaaagcgggaaaactcttcccgaaaacgggaaacaccttcccggaaacggtagccacccaagactataacaataacaatattaaaagatcttcgtctaagaattctggcgaatcctcagacgaccgcctaaaggcgtttttatcagctcatcctgatgctgtgatttacacccccaatttcaccaagtggggtacagcagcagatcagcaatgcgctgagtggatcctcgctctgctcgaaaaagttaaacccttcccgaagaaacccgttctggctgcctgggctaacgacgttcgcctgatgcgcgatctcgacggccgtagccatcgcgagatttgcgagctcttacagtgggccagcaaagatacgttctggcacacgaacatcctctcgcctgcaaagctccgcgccaagtgggacacgttgagcctccagcgcgaagctgctatccgcaagaccaccagcgatgcaccggccagtgacgcgcactggaacagccctgaagcctggaaggatttcatatga

SEQ ID NO: 899 - DNA, 954 bp, Kosakonia cowanii
  source 1..954: mol_type = genomic DNA
atggctacaactgttaataacgatctggtcatctatgacgatctggcgcaggccgctttcctcgagcgccgccaggacaatctggaagtgttcaacacttcctccaacggcgcgatcctgctggacaatgaactcattgaaggcgacttccgcaagcgcgccttctacaaagtaggtggctccatcgaatcgcgtgatgtgaactccaccggcaaggtgaatggtaaaaaaatcggtgccggtgaggcggtttctgttaaggcaccgtggaaatacggtccgtacgaaaccactgaggaagcctttaaacgccgtggccgcacggttgacgagttctccgaagtgattggcgttgatgtggctgacgctaccctggaaggctacgtgaaatatggccttaaggcgctgacggcggcaatcggagcaaacaccgatatggtggtgaccgccgatatcgaaaccgacgggaagaaaaccctgacgcgcggcctgcgcaaatacggtgacaaattcaaccgcgtggtgctgttcgttatgcactccgccacctacttcgacattgtggacgaggcgatcgccagcaagatatacgaagaagcgggcgtggtggtgtacggcggccagccgggtaccttgggtaagcccgtgctggtgaccgataccatggatgccgccgctattctggggctggtggccggtgcggtgaccgtgactgaatcccaggcgccgggcttccgctcctacgacatcaacgatcaggaaaatctcgctgtcggctatcgcgcggaaggtacagtcaacgttgagctgctgggctacagctgggacacggccaaaggcgagaacccggatctgaccgccatcggcacggccggtaactggaaaaagcatttcacgagcaacaaatccactgcgggtgtgctgatcaagctgggggccgcatcgggggagtaa

SEQ ID NO: 900 - DNA, 597 bp, Kosakonia cowanii
  source 1..597: mol_type = genomic DNA
atggcgcaattacaactcatcaagcattcttcaaatatcctgatccccgccacgccggagaccagcgatttcctgctatcaaaatgtaagctcggcgccgtgctggtggccgatttcaaacaagtccgaaacccggcctttcaccgtcgtttcttcgctctgctgaatctcggcttcgaatactgggagcctactggcggggcgatatcctcaaatgaacgcaggctggttaccggctatgccaaatacctggcatcgttcggtgggagcgaaaccgcgctgctggatgctgctgagcagtacctcgatcgtatcgccgataagcgcacgggcagcatcagtgcctgcaaatcctttgacgcctatcgtgcctgggtgactatcgagtccgggcactatgacgccatccagttgcctgacggaaccctccggaaacatccccgcagcatcgccttcgccaatatggacgaaaccgagtttcagcagctctacaaagctgcgctcgatgttctgtggcgctggatcctttccagggcattcagagaccagcgcgaagctgagaacgctgccgcgcagctgctgagcttcgggggctga

SEQ ID NO: 901 - DNA, 240 bp, Kosakonia cowanii
  source 1..240: mol_type = genomic DNA
gtgaaagaaagtcaggaccaaggcgactggtacgatattgtcaggcgttcagatggcaagcttgtcgggtcaatgccgctcgaaagccgcaacatcgtctacatcaaaaatggcatggtttcatgtcgccctttgatggaggatgaaggtattttcaatctgtcgtccggaacacgttttcttcgccgcctcggctaccgcctcgaacaaccctctgatatgatgatatcaacggactga

SEQ ID NO: 902 - DNA, 1086 bp, Kosakonia cowanii
  source 1..1086: mol_type = genomic DNA
atggcaacggtaaatgaaatattacgtgacgaagccatagcccacaccgtctggatcagccgttatagcactggtgtggcaaaccgcatggttaagctgctgaacgacagcgacgctgatcttaccgcacggctgctgttggcgatggacagcctgcccaccagtcagtttacggtcagccgactggaaagcatgctgggaagcgtacgcgagcttaaccagcaggcaatagcgggcatgcagaccagcctggcggatgagctcctgctgctggccgggcatgaagcaggctatcaactgagcctgtttgattcactgctgccgcagcgggtgaaagagcggtacccgctgcagagcatcacacctgagcagctttacgcggccgccatggcccagccctttcagggacgtctgttgagcgaatgggccgataaccttgaagccgaccgcatggcacgtgttgttaatgcagtgcgtcgcggctacctgcagggtgataccacggagaccattgcccggcaggttcgcgggatcgccagcaaaggctataaggacggggcgctgcagctcagccggaccaatgccgccagcattaccaaaacggctgtgaatcacctggcagccacggcgcggactaattttgcagaagccaatggcgatgtactgaaaggtaaacagtggctttccaccctggacaataaaaccacgccgacgtgcatcatccgtgatcgcctccgttacactctggacaacaaacctgtcggccacaaggttccgtatctgcaggggccggggaaaatccatttctgctgccgttccacggagacgctgattactaaatcatggcgtgagctcgggatcgacagtaacgagctggatgaagatactcgcgccagcatggacgggcaggtgccagcggataccacatatcttgactggctggcccggcagtcgctgccgcgacaggatgagatcctcgggccggagcgggccgcgctctaccgcgctggcgagctgaagctcggggaaatgttcacagacaagggggaatggataagcctggcccgccttaaagcgctcagttga

SEQ ID NO: 903 - DNA, 207 bp, Kosakonia cowanii
  source 1..207: mol_type = genomic DNA
atgaaagagacctggttctatcacatggaatgcaccacggagcaggcagaagagctgctggcgcaataccgacgccgcggcgttaaggtcgagcgcagcctcaaccctgatttcgtcacctggaccgtcagcgccctgctgccggagggcaatcatccgccgcgcccgagccgggtatggcaaagcaaggcgtggggtcgaacatga

SEQ ID NO: 904 - DNA, 324 bp, Kosakonia cowanii
  source 1..324: mol_type = genomic DNA
gtgtgcaaccacttaaaaccaaagcaaaaggccatcgtggagttcatcgagacaaacggaccggcaacgccccgccagatccgtaagctgctctgctgcgacatccgtgaggcctacgaccgtctcaagcggctgggtatggccgggatcgtcaaaaatatcggcaaaccgaagcatccggaataccagctggtgcagcgctggcaggaaaaaatcaagcagccgaagccgcggagaccagcagcgccatcagcggccgatgtatgccgtcagaactggcagggctacgaaattcataaaatctttgggagtgcgcgggcatga

SEQ ID NO: 905 - DNA, 210 bp, Kosakonia cowanii
  source 1..210: mol_type = genomic DNA
atgactggtatcgaaaatgcaattatccgatctggctcggccagtgcgcttggcgctttgatcggagtttcaaaaatggctgtttcgctatggcgccgcaaaggcattcctgccgaacgagtgctgtcagtttttgaggccaccggggtaactccccacgagcttcgtcctgatctttacccaaatcccaccgacggtttaccaaagtag

SEQ ID NO: 906 - DNA, 483 bp, Kosakonia cowanii
  source 1..483: mol_type = genomic DNA
gtgagcaaagtaaagcaccaatttaccattgagtcaacacgagcctgcctaccaactggtaaagctattgtttacaatccgtgcatgaataaaaaagatcctaaccagagcctcatatccaggcttaccgaattgaacggcaaaggcttttctaaaacagagatggccaaggttgccaatgtcagtaagcaagcggtcaccggatggtttcgaaccggcaagatgagcaaagaatctgccttggccgttgcagatgctgctggcgtatcggtgccttggctactcggtgaggacgttggcgaaaaagacggccttaagccggacgaacagcgcctgctggagctctaccgccaactgccggaagaagagcaaaagaacatgctccgcatcttcgcgattcgcctgaaagagctggatgagttgtatgagaagtacatgagtcgcaggattaaaggcgacaaacccgaatcaaatactaactag

SEQ ID NO: 907 - DNA, 570 bp, Kosakonia cowanii
  source 1..570: mol_type = genomic DNA
atgcaaacacgaatttttaaccatgatagcagcccagctcctgggcgagtgacatcgaaatatcaagagcttccgcgccactcgtgcaaactctcgaacatccggaaggccgtaaaagcctggaacagggcaacgcccggcgacgcgcaaaactacatctcgcagctggttgcgaaagagtggtttgccagtggtggccgtggcctgttgctggccggttcggtgcacggcaccaaagttaatttctttcggatgattaataacgccgggccgaagtatgacaagtacctggagatgctgactccggcgatcgtggcggtgatggctcgagataacgaagcgatagcgcgcgagttcgggctggtgacgggcaaaacgaatgaagaactgatcgctgatgcaatcaaagaatgcggagaagcgcatcaggcaaagcttcttgggcagccaattcagcgactggagaaggaggttcgtgaagcagcagaagcattaatgcgtttcctgccaactgattccctcggcccggttctggcgagcctggccgcgatggttccgggagtgatgtga

SEQ ID NO: 908 - DNA, 492 bp, Kosakonia cowanii
  source 1..492: mol_type = genomic DNA
atgcgcctgaatgccaaagagttgatcgccgaagccagagcgaccgcccctactctgccaccagcagcagcaaagttaatgaccgcgatggctgaccgccttgatgttcagttcgcggcactgtgcgaatcgaggaacgaggcgaagcagctggctggagagaatgctctgatgaagtcggctattaaaactcatagcgaatcagtccacttctgcgtgggttgtggcaaagatgatccatgcagcaatgacgatgtttgctatgcactcgaagaaactccagccactgatgcattcctcgcctccctgcgcgcagaaggggtggagatggcaataggcgcagttttaaacgttgacacagtggcttcaacaggtgctttgaagttcgtatttcatcagtttgctgcccagctccgcaataaaaccgaaccatcccccgagaccgcagctatcgcccgccagtttgaacagttgaagggggatgaaaagtga

SEQ ID NO: 909 - DNA, 1266 bp, Kosakonia cowanii
  source 1..1266: mol_type = genomic DNA
atgatttacacaactggctctattgcagtcagcggcaacacgctgaccggcaccggcacgaatttcaccgcagcaggctccctcatccgtaacggctgcacggtgctggcactgaccagcccggcgcaggctttccacatcacctcagtcgacagcgcgaccggcctgaccgtgtcgcctgcggcctcgcctgcgatccctgcggggacaaaatttgccatcctgctgagcgacagcttgagcgtggatggccttgcacaggatatcgccgagacgttcagcatgtaccagcggtacatgggcggctttgctgacgtgatgaacggcagcggagatgtgaccatcaccatcaacggtcagcccgttaccgtgcccggtcagaaatcgctggcgaagaagggggctaacgccgacataaccagcctgaacggactgacaacagcgatcacacttgctcagggcggtacaggcgcaaagacggcagcaggagcacgcaccagtctggggctgggaagtatggccacccagagttctgacgcggtaaatataactggtggatccggcacattcaccagccttagctctgacgcggtgaccatcaccggtggaacagcttctcttggcactatcgagacaaaagcgggggcggagcagccactggtaatacgcaccgctccgagtgggcttggctatatacgtttcagggatgcgtctgaaaatccgctggcttatctgggattcggatcgagtggtgcccagcaccttattctggcgagcaacattggaggaaataacgtcacgctgaatactaccggcgctgtgacagtgaaagcagggggcgctaactacgctttccagacaaacggaaccgctacggggcagctgtggcagagcacatccgatgtcaggatcaagaaggatataaagccgatcaccaatgcgcgtgaggtaatcagtgcaatcaccgggtataccttcaagaagagatacaacctctatgacgtcgccgaaccgctttataccgaagaggcggggatccttgcccaggagcttgagctggtggcgcctgaagccgtctcaaaaaatgatttcggcgcccacgacctcgaaaacaatccgattgatgatttacgcgcggtcaactatgcggggatcacaccatacctgatagagctggcgaagctacatgaggccgagatttccgatttgaaggaagaagtggcacagcttaaggcactcgtgtcttccctggcgcagggctattaa

SEQ ID NO: 910 - DNA, 711 bp, Kosakonia cowanii
  source 1..711: mol_type = genomic DNA
atgcgggacaagacaatcagcgcgattctggcgcatgcggcgcagtcgttcccggctgaatgctgcggtgtggtgatccagaagggacgggttgagaagtatgtcgcctgccggaatctggccacctccccggaagagcagtttgagctgtcgccggaggattacgcggcagccgaagagcagggtacggtggttgccgtggtgcacagccaccccggcgacggcgccacgacgcagccgagtgaactcgacatgctgatgtgcgacgcgaccgaagtgccgtgggtgatcgcttcatggcctgaaggcgatatccgcaccatcatgccgcgcggcgatcgcccgctgaccgggcgtcagtttgtgctcgggcatgctgattgctggtcccttatccgggattactttcgcactgaacacgatatcgaactgcccgactacagcgttgatcgccactggtgggaggaggacgaaaacctctatatggataactggcacgactgcggattcagggagttcgacggtccccagcagcccggtgatatggtcatcatgcaggtgcagtccagcgtgccaaatcatgccggtgtcctgctggagggcaacatgctgctgcaccacctgtacggacagcttagtcagcgcattccgtatggcggctattaccgtgatcgcaccatcaaagttttacggtacaaggatctgatgtaa

SEQ ID NO: 911 - DNA, 339 bp, Kosakonia cowanii
  source 1..339: mol_type = genomic DNA
atggcagttgagaccttctcctggtgcccgaaggtggccgcgcaggcagataccagcttccgcacccgtaaggcgcagttcggggataactatgcgcaggtggccggggacggcatcaacccggtcacaccgcaatggagcgtgagttttaccggggatgaagcgtatgtccaggccataaaggcgtttcttaagcggcatgccggctggaagtccttcatctggaagccgcccctggagcccgcagggttatggcgatctgaatccctccagatagccacccacggcaacgacaaatacaccctcagtaccacattcattcaggcataccatccatga

SEQ ID NO: 912 - DNA, 3492 bp, Kosakonia cowanii
  source 1..3492: mol_type = genomic DNA
atggcaacgcttcgcgaacttattataaaaatttctgctgactccagctcattccagagtgagatcacccgcgcctctcgcatgggctccgactattacagaacaatgcaggcgggaggccgccaggcggcggcggcggctaaagaaagtgaaagggcgttatctgatctcactaatggttttgcctcagcaggtaaagccgcagctgcggcaactgcggcttttgctacagggaagctggtgcagattgcagatgaatggaactcagtgaatgctcgtcttcaacaggcttctgcttcggctgatgattttgcgacttcacaacgtcagcttatggaaatcagtcagcgcacgggtacagcgttctctgataatgccaacctctttgcccgcgcagctgcatcgatgcgcgaatacggttatagctctgaagaagtgctcaaaatcactgaagccgtttcaaccgggctcaagctttcaggtgcgagcacacaggaatcaagttcggttattacgcaatttagccaggcacttgctcagggcgtattgcgtggcgaagagttcaatgcggtcaacgaatccggtgatcgggtcattcgtgcccttgccacaggcatgggcgtagcgcgcaaagatcttaaaagtatggccgaccagggcaagctcacgatcgataaagttgtgccagcactaatgagccagcttggggcgttacagggtgagtttgcaacgatgccccaaactgtttcaggctcattgcaaaaagtcactaactcattcatggggtgggtcggaggagttaacgctgcaacgggtgccacggatgcgctgtccggtggccttgatggtgtagcccagacactggactcctttacttcatccgccgtcagcggtgctctgagtgatgttgccgacaatatgtcggttatcactaccgtagcaggtgcgctggtgggtgttggcctggctaagtatctcagcggaatagttaccagcgccacgagtgcgacaggtgctttgatctctgctgcgaaatcagaagttgccctcgctgtagcccaggacagggcagcccagtcagctgtggcgtcttccagagctgacgtctatcgagcacagcaagccttgcagagagcaaagggcgctgatattcaggccgcgcaacaggaaaaaattgcagccgcagaggcaaaggtaacagcagcacaggccaggctcacgacggctcttgccggaggcacagcaactgagaaagtcagggccagagcagcgcttgagcgtgctcacgctggtcttgcagcggctaaaaatgcggacgtacaggcagttgctgaacgacgactggcacaggcagaggctgcgcgtgacaggaacctggccaaccgtgtctcgacccaaagtaatttaaacagtgtcaccgctgtcggatcgcggctcatgagtagtgctctggggattatcggtggcattccagggctcgtgatgcttggcgcaggggcatggtatgcggcatatcagaatcaggaacaggctcgccgttctgctcaggaatatggcagaacgatagatgagataagcaaaaagaccagggaaatgtctttgccggaagcttccgacaatagtgaaaaagccaaaaaagctcttgatgaacagaacaggcttatcgatgagcaaaaaagcaaaattgaaagtctgaaagagcagattgccggatcgcagtatctaatcaacaaccccggcccgactacgaaaggtggtttcatgatcaaccaccttacctctctgaagactgtaactgatgacctgtcgactgcaactgagcagttgtcggttgaacaggaaagactttctcagatgcaggagaaagcagcctccattcaacaaactctcgaggggctccagtaccgtcgggtctcgctgattagagaggaagcggctaatcaaaattctgcctaccagtctctgctgatgatgaacgggcagcatgaaaaatttaaccagttgctcggactcggcaatcagttactgatggcccgtcaggggatgacgcaggcacccctgcgagttcctcaggctgaagcctcgcaaaaacagaccgaggcgctcgaaaaaagccgacgcgagctggccctgtcccgcctgaaaggcgaggcaaaagagcgcgcacggcttggctatgctgctgatgaactcggtctgacggctgatccgcaattccagactaaccggcttgagtacatcaataacgggcttgaagagtggcgcaataacgaggccaacaaaaagcagcccaaagggccaaagacggacgaagaaaaggccgctgatgcttataaaaggatgatcaagcagcagaaggagcagatcgccctgcagggacagagcaccgaactcgccagggtaaaataccaggtggttgagggagagttgtccaccctggacaaggcgcagaaggctgaactgatgcgcaacgcagccttaatcgatcaggtcaaactgcgcgagcagctgcgtaattacgaggcgaatctggctgacagcaacgccagcgcccgggcggccaatgatgcacagctcatcggttacggtcagggcacccggttccgtgagcggatgcaggagcagttcaatatccgtaaggagtttgagcagaagaataccgatctgctccggcagcggcaggccggggatattgacgaaaccttctaccagcagggcctggtactcaacagacgctatctggaagagcggctgcgcgaccaggagggatattacaccgcttccgatgcgcagcgcggtgactggttaacaggcatgtcagagggctatgcgaactgggtggacgaggcgacggactacgccggaatggctgcagatgggatgaagcaggcgatgggcggggcggtgaccaccattaccgacatgcttaacggcaatctcgacagctggaaagactggggcatgaacgtgctgaaaattatcgagaccgttctcgttaatatgatggtcgccaatgccgcgagttctctcggctcacttttcagctttggtgcctcatccgccgcaacggccagtagcgggacggccattcagagcgctgcctcaaacttcaccttcaatgccgccggcggcgtctacgactcaccgtctctcagcgcctacagcaacggcatttatcagacgccccagctgtttgccttcgcgaaaggggccggggtatttggcgaggcgggtccggaggcgattatgccactcacacgggcacctaatggtgatcttgctgttcgcgcagtagggatgccgcagttttccggcggcggcccgtcagtgtcgttcggcgatatcaacattcagggcggtgcgcagtcgacggcaggacagggggcagcagcatctgccggcaggcagcttaaagatgcaatcgtgacggtgattaatgagcaggccagcatgccgggctcgccattatggcggcttttgaaaggagcgtaa

SEQ ID NO: 913 - DNA, 3762 bp, Kosakonia cowanii
  source 1..3762: mol_type = genomic DNA
atgacgaacacagcgattaaagggcgtaaaggcggcggcaccaagacccgcacgccggtggaagccccggacagtattcagtccatagccagagccaaaatacttgtcgcgctcggcgaaggggagttcgccggcggcctggacgggcgcagcatttatcttggcgacgcgtcatcgtataccccgctgcagaatgccgacggcagttacaacttcaacaacgttaaatacgagtttcgttccggcacccaggatcagacctacattcagggctttcccggcgttgagaacgagctgcaggtcgcctacgagcttaaagctgctgtgccgtatgtccgttccgtctccaatacccagctttcagcgttacgcatccgcctgggatggccctcgctgctgaaccagaaagataacggcgataaagtgggtacgcgcgttgagtatgcgatcgagctgtcggtcgacggtggtgcatacgcgcccgtggttaagggtgctgtcgatgacaagaccaccactctctatgagcgcagccaccgtatcgacctgccgaaagccaccaccggctggcagctgcgcgtgcgccggattacaccggattcaacgacggtgaatgttgtggacagtatgcgcgttgaggcggtcaccgaaatcatcgatgcgaagctgcgttaccccaatacggctctgctctacattgaattcgatgcgaagcagttcccgaacggtattccgcaggtggtgtgcaatccgaaggggcgcattatccgcgtgcctgatacctacgatccggaaacgcgaacctactcgggcacctgggaaggcgggtttaaatgggcgtggaccgataacccggcgtggatttattacgacatcgtgctgaatgagcgcttcggtctcggtcagcggattgatgcgacccagattgataaatgggagctgtaccgcatcgcgcagtactgcgatcagccggtaccggatggcaagggcggcagcggtaaagagccgcgcttccggtgtaatgtctacatccaggagcgcaatgacgcctggacagtgctgcgcgacctggcgggcatcttccgcggcatgacctactggggtgacaacaagctgtatgtgctggccgatatgccccgcgatgtggcgcacatctacaaccacgccagtgtggtcgacggtaagtttaccttcgccgatcccagcgaaaccacgcgcaacaccgccgcgctggtgaactggtccgatccggcgaatcactacaaagacacaccggaagtggtttatgacaacgatctggcgatgcgcttcgattacagccagctcgaaatgacggccatcggctgcacccggcagtcagaagctaaccgccgcgggcgctgggcgctgcttaccaacggcatcggtgaggtggtgaccttcagcacggggatggatgttccctctgtcggtgaggtgatcggcgtggccgcgaacgagctggccggcagggtgattggcggcagggtaagcacggtcagcggccgtaatatcacgctcgatcgtgccgcggatgtcaaagcaggcaaccggctatttctcaacctgccctcgggtgtcgcgcaggcccggaccgtgcaggcggttaacagcaatatcgtcaccgtcaccactgcctacagtgaaacgcctgaagcggagtgctgctggggtgtggatgctgacgatctgtttatcgcgctctttcgcgtaaccggcacccgtaacaacgatgacggcacgtttgaggtgaccggcgcgacgtacagcccggatatttatgcctcggtcgatactggcgcgcggctcgatgaaaggccggtcagcatcattccgcccggcgtgcaggcaccgccggaaaacatcgtcatcgacagctattcgacggtcagccagaacatagcgatcaccaccatgcgtgttgcctgggattctgttaaaggggcaattgcctacgaagccgagtggcgacgcgacagcggcaactgggtgagcgtgccccgcacctcctcacagggattcgaggtgccgggcatctacgccgggcgttatctggtgcgggtgcgggcggtgaacgccagcgatgtctcgtccatatgggcgacatcagctgaagtcacgctcaccgggaaagtgggtaatccgccgaaaccgctgggctttaccgcctccgaaaacgtggtatttggtatcgagctgaactggggcttcccggcgaacacggacgacacgctgaaaacggagatccagtacagcctgaccggcagtgctgacgatgccatgctgctggccgacgtgccttatccgctgcgcagatatcagcagatgggactcaaggccggacaggttttctggtaccgcgcgcagctggtggaccggaccggtaacgaatccgggtataccggctgggttcgcggccagtccagcaccgatgtgaccgacattacagaggcggtgctcgcgcagatcaaggacaccgaactgttcaaggatctcatcgagaatgccgtggacagcagtgccaaagttgcggaactggcagaggcagtgaggcagaacgccgacggcctggctgcggcggcaggcgcaaaccgccagacagcagaagccattatcggcaatgccctggcgatcgcggatgttgttgtccggcagtcagcccagcagggcgctaactccgcgaaatttgagcagctgcgcgaagttatcgccaccgaaacagaagcgcgtgttaccgatgtgatccgcctggaggcgaagacggacaagaacgccgccggtattaccgaagtgcgccaggcgctggctactgaggaggaagcgcgcgcaacggcggtagatgagctgactgcgcggacggataaaaacgcagcaaatgtcaccgtgctgacgcagaccgtgacggatctggactcgtctactgcctcgcgctttgaggagatttcggcagagatctcgggcatagatggcagtgacatcagagggggaatacagagcaactccattgcgctgatcaccaccacgctggcgcaggtaaatgatcgcacacgcctcagcgtgcagtacggtgacaacaaggcgggaattgagcgtgttgataacgtgatggccgatgccagccaggctgtcgcggagtcgctcaggtcgatggatgccagttccggcgccggcacggcaaataccaccgactttgcaaaaaccattgccgacttctcgcaggtttcggccacaaaaatcaatacactttcagtgacggtaaacggtcagcaggcggcaatcgtccagaatgctcaggtttctgccgacatcaacaataacctgaatgcgatgtacagcatcaaggtgggcgtcgatgccgctggccgccagtatgctgcaggcatgggtatcggtgtgcagaacaccccggcgggcatgcagtcgcaggtcattttcttggcggaccgtttcgccgtgatgtcacaggccggcgggacggtgagcctcccgttcctggtgcagaacggtcagaccttcatcaacgaagcctttatcaattacgcgtccattacgctcgccagggtgggctcctggtattcagcaaattacgtggccgggcagaccgggaccatcatgaaggcggacgggacgtttgaggtcaacggtgcggtatcaggccagggacgcatgcagataacgaataaccgcatcatctcttacgatgcgcaaaaccggccggcagccgttatggggcaacgcttataa

SEQ ID NO: 914 - DNA, 759 bp, Kosakonia cowanii
  source 1..759: mol_type = genomic DNA
atgagtatttcatctgatgtccagaaactggagccgggcagccgcgtccgccttatcgaggtcgacggtgaagctttcggtgccggtattctgcggtttcataacgaaaccatccctcattcagaggccgagatcactgccgccggcggcgatgcgtcaaagcttccgccgaagtctgtctggtggcaggggctggagtatggtgcgtggccctttgaactgaccggcctgtccgtcagcagcgacgggcagagcgcccgcccgacactgaccgtggcaaatatcagcggcacgattggcgcgctctgtcgtcgctttcaggggatggctaaggcgaaagtgattatccacgagaccttcgctcattatcttgatgcccgcaactttgctggcggcaaccctgctgctaatccgacagaggagcgcaaacaggtctattacatcgaccgtaaatccagttcggatgatgaaaccgttgagtttgaactgtccagcccggcagatcttcgtggacagcttatccccacgcggcagatccagcccatgtgcacctggtgcatgcgcgggtggtacaaaaccggcaacggctgcacctatgccgggcagaatggctggttcgataaggacggcaaccgggtggatgatccttcgaaggacgtgtgctcaggcctcttgtcgaccgggtgtaaaccccggttcggcgccaacaatgaactcgactacggcggctttccgggtgcgtcacttctgagggggtaa

SEQ ID NO: 915 - DNA, 600 bp, Kosakonia cowanii
  source 1..600: mol_type = genomic DNA
atggaaaaacgaaccgttatcaagctgagcgggtcaatggcgcagcgtttcgggcgcacgcaccgccgggcgctgtcctctgcgagcgaggttttcagggcgctgtccagcacggtggacggctttgaagattatctccgcgaggcgcgcgccagggggctcgatttcgtcatcttccgcgatcgccgcaacatcggtcaggaggagttttcgcttctcggccccggcgatgagctgcgcatcattccggtgatccgtggcagcaagcgtgccggcatcttccaggcggtactcggggctgccctgatcgccgggggtatcgcccttggccctgccggagccgggctcatcggtaaaggggttgcgctgaatgttgcgctggttggcgcatccatggcgctgggtggcgtggttcagctgctgtcacctcaagtggcggggatgaggatgcgtcaggatccggacaacaagccatcctatgcgtttggtggcccggtcaacaccaccgccagcggcaacccggtacccctgctctacggccagcgggagatcgggggtgccatcatttcagccggcatttacgcggaagatcagcagtaa

SEQ ID NO: 916 - DNA, 759 bp, Kosakonia cowanii
  source 1..759: mol_type = genomic DNA
atgaacctcgaatcattaccgaaattttattccccgaaatcaccgaagcttaacgatcagacgccagcgaccggcggtgtcgcgctgactatcaccgatgtaatggcagcccagggcatggtgcagtcgaaagccagtctcggttttaatctcttcctggcgaaaatggggattcaggatccggcacctgctattgatgggctgatgcaatatgcgctggcgctgaaaaatcctgtgctggggaagctgagcgagaaggctcgcgttgaagttctgccggtgctggtgcagtttgcttatgcagattattcgcgttcggcagccagtaaatcgacctgcccacattgcgaagggaaaggcgtggtgcgggaaatgcaggacgtggttaagcacactggcgttaatggcgtagaggcaacggttaagcacgaagccgtagaagtgatgtgccagcactgcgcgggaaaaggagaggtgggcacggcctgccgcggctgtaaaggtaaggggaccgtgctggatgagaagagaaccaaactccacggcgcaccagtcaggaaagtttgcggtcgttgcaacggaaaccgcttcagccgtttgcctacaacccttgcgcgggcgcgcattgagaagattattcccgatctgaccagctaccagtggtacagcggctatggcaatgtaatcgcgctactggtaacaaaatgctggcaggaagaggcttttgccgaggtgcaactgcgcaaagtcacaagatag

SEQ ID NO: 917 - DNA, 1146 bp, Kosakonia cowanii
  source 1..1146: mol_type = genomic DNA
atggctgctagaccacgttcacataaaatctcagtacctaacctttactgcaagctggataaacggacggggaaaatatactggcaatataagcatcccctttccggacgcttccatagccttggcactgatgaggccgaggcaaagcaagttgccacagaagcaaatatgattattgcagagcagcgcacccgccagattcttagcgtgaatgaccgacttgccaggatgaaaggcaagcgaaccgatatcacggttacagagtggctggacaaatatatggccattcaagaagaacgactcaaacacaatgaattacgtccaaattcattcaagcaaaaaaataaaccagttcgtctgtttcgtgaacattgcggtttgcaacacttgaaggatattaccacccttgatattgccgagatcactgatgcgataaaagcggaaggacataaccgcatggcgcaagtggtgcgtttggtgttgatagacgtctttaaagaagcgcagcacagcggccatgtaccacccggatataaccctgcgcaggcaactaagcagccgagaaataaagtcaccagacaacgactttccctagatgaatgggagaagatctacaccagcgctgaacaacaagagccttatcttcagtgcgggatgttgctggctttgattacaggccaacgattgggagatatctgtaacatgcaatttaaagatatttgggatgacatgctgcatgtggaacaggaaaaaacaggctcgaggctggcgatacctttagatttgaaatgtgatgtgttaggcctaagtctcagggacgttatttcgaagtgtcgcgacgctgttattagtaaatatctggtgcatttcaggcatacatctgcccaagcaactagaggagataaggtctctacaagttcactaacaaccacttttagaaaggcgcgagataaaagtggtcttaattgggataaagggactgcccctactttccatgagcaacgttctttatcggaacggttatacagagaacagggtgtagatacgcaaaaactgctggggcacaagacacagaaaatgacggacaggtacaatgatgaccgagggaaagattgggtaatagtaagcgcaaaaacagggtcgtga

SEQ ID NO: 918 - DNA, 252 bp, Kosakonia cowanii
  source 1..252: mol_type = genomic DNA
atgaaaatgattaacgctgcggcggttgtgctggtttcgttaatggcatcaggctgcgccagcaacacgcccccgctgtgctataacgaggctgtggtgatgaaaaaaaaggtgtcggttccggtattcggcataagaaaaccggtcagcaccaccgaatatctctccggcggcagcttcggttatcagtgggttgagcggagtgcttttacagacacctcggcctgcgacaggctgccggtgactgagtga

SEQ ID NO: 919 - DNA, 954 bp, Kosakonia cowanii
  source 1..954: mol_type = genomic DNA
atgcagatgtttattgcaggtaccagctttgacgccatcaactctatggcggcaagctacgttctggatgtcatcaccattaccggcacagggagcaagacctactccctttcaggtgtatcgctgacatacgccattgtgaatgattttatgggagggcagttaacgggcgcgacctacagcgtcagtgtcagcggattaaccgtatcgtggaacgtcaataatgccgtcacccttattgtgtacggcagcccggtagcgggcacgcagagtgactacttcggcttccagttgttccagtacataaacggggtgaggacggtcaagctggctccgaattatgtgccgctgtgcctgcgccagattatagatgtgccggccggcgcgcggaccgtgcagacgcaggttccggccggtaacccggtaatgtgttttcaccgtcacaccggcgaggcgatggatttgtgctggtggaagcccgtcacggccagcgggtatcacgcgctgcagttccccactgcggcaagtaaccagaccgggtgccgggtgtatgtattttcgaatattctcgcgaatatcccggattatggcttctttctctaccgggacggacagatggtctggcacagcaactgccttccgctgcaggtcattccactgactaacggggatatcaccagcgccacgccgctggcggtgtcatcgagtgtcacgtcacatatcttcgtgcctcaggacccggcatatccgacgggatacagcaatttcatgtgtgcatcagcgggaaaagacggggctgcgtataaagtgcaggtcgggaaagtattccagagcacctatatcagcaaccccgatgaaggaaggaggatgagagggtgggcatgcggcggtgtcgggtatatcgacacccggttctatgaccagtactacaaaaatgcgctgggcatcacctga

SEQ ID NO: 920 - DNA, 1467 bp, Kosakonia cowanii
  source 1..1467: mol_type = genomic DNA
atgttttccctgaatacacttgcagtggttgtgggtgcctgcatcctgacgggttgtaccgtcggaccggactattatcgccctgaggtgcccattgcgaagcattaccacgctcagccggctttacagcagcccactacatccgaatccgccagtttttcaatctggtgggaaaactttggcgatccgctgttaagtcggttcgtttcagatgcacttacgcaaaatcttgacctcgcccaggcatccgccaggatgatgcaggcacaagccgggctgggagcggcaacggcggcgctgcttccctcgggaaatatcagcgggcaagctgcacgtgcgtatcagtcggttgaaacaccgttgggtcaggtgcttagttcaacgccggattataatcgctacggcagttcgtatgaaacggatctcaatgcaggctgggagatagacctgtttggtggcctgagacgaggccgtcaggctgctctggccgattatcaggcttctgaggccggtgtagcggcgacacgtcttgctgtcgcagcacagactgcagatatctatatcaccctgcgtggattacagtcccgtctggatattgcgaataaacaggtcattacacagcaactgctgctggaaaaagttcagctattgcacagcaaagggctggcatcagaatatcaggttcgccagacagaaggcgcactggcacaggtgaaggcaacggtaccggttctgaacaacggacttgatggcgccatgaatgcgctggacgtcatgctgggtacgcctccaggaacgcatcatgcgcaactggcttcaccgggggcaattcctcatacacccgcaatcaccgcaatgggcaccccggctgacctgcttcgccgcaggcccgatattattgtggccgagcgccatctggccgcatcaagcgcccgtatcggtgtggctgtcagcgagtattatccaaaattttcccttaacgcgttgcttggcagcgcaacggcagtgtcaggggataatcttttcactgccggtgccagccagtcggcaggtgtgctggggttacgctggcggctttttgactttggtcgtattaacgcccagataaagcaggcagagggccaggaagctgaggctctcgcggcttatcgtctgtcagtcttgcgcgcagcagaagacgtagaaaacgcattctcggcactggtcaatcgccagacgcaggcagccacactgacgagcggcgaaaccgccctggccagcgcccgacagtcttctttcgtggcttttcagcaaggtacagccagtctgattgacgtactgcataacgatgaaacgcttctccaggcctcggatgcaagagcgcaggcgcagacagaagctgcccatgcagccgtggcagcattcagggcgctgggcggtggctggcaatctacattgtctgaagaaatagcaaatacgccgggataa

SEQ ID NO: 921 - DNA, 2967 bp, Kosakonia cowanii
  source 1..2967: mol_type = genomic DNA
gagacgcagcgcgccacagcggcgcaggagaacttactcagatccatcactgaccaggcggcgacagtccgcgccagcaaagcggacatggctgagtaccgggcggcgcaaatggggatcgccgaggaggctgccccagttattgcacggctgcgcgagcaggagcgtgccgtccagcaggaggctgcccagcgccagatcgccgccagccagtcccgtatgctcaagcaggttattgcagagcttgaggcggcagagcgggccgaagccgccgaggcgcaacgggcacaggctgtccgcgattcattcatccgttcactggcagaccaggccgtagcgattggcaaaacacgggcagaactgctggagatgaaggccgctcagctgggtgtgtcgcagcaggcagcaccgttcattgcgaaactgcgtgagcaggagacggcatgggagaggggcattatcagcgctgggcaatatcagcaggctatgcgccagctgcctgcacaaatcactgacgtttttacttcgctcgcgtcaggtatgccaatctggctggtggctatccagcagggcgggcagatcaaagactcgttcggcggcatcggcaatatgcttaaagccctgggcggtctgattactcctgttaatgtgggcctggcgcttctggccggtaccgcaacgctgcttaccgtagcctactttaagggatcggcagagaacgctgagttcaacaagcagttaatcctgacagggaactatgccgggcagaccgcagggcagctatccgcgctggcaaaatctctctccggcaatggtgtcacgcagtacgccagcgccagcattctggccgaggtggttggatccggtaaatttaacgcagataaatttgaatcagttgcgcgcgcggcaatagccatgcagcaggctaccggccaggccgtatctgagacgatcgccaactttaaaaagttatatgacgatccgacgaaagcatcggccgagctgaacagccagatgcattacctgaccgccacgcagttcgagtacatttctgcgcttgaacgacgaggggataaggaagcagcaggccagacggcagcggatgcctacagcaaagccgagcagcagcgcagccagcagatcctggataacctcgggctggtggaaagggcggcgaatgctacccgaaatgctcttaagggtatgtgggatgagctgctaaatattggccgcccgcaggcaccccaggacatgcttaagcagatggaaagccagctcgctgcgctggaaaaaaatctgcttcctgagcgccagcgcatggggtatggctacagctatgacaccagttcgcaggatcaggaatacgataatcgccgtaaggcccagcttgccgcgattgcgtcgctgaaagcccaggttagtccgatgcagcaggcgatcactctccaggaaaacctcaatggcgccataacgtcaggcaataaggtgaatgaagatgcgatcgatgcacagcaggttatcaatcgttaccttgatgccggaaccacggcagcggataagcggcgaaaggctcaggaagagttaaataaggcgattgccgacaatgctaaggccgccagagacgggacggcaaaactgtggacgccggaagaggttgcaaaggcgcgtgctggcattgagaagctgtatcaggatcccaaaacgcctaaagcaaaaggagtaacagttactgccggcgatcgtgccgaagattctgcgcaggctgaacttttagctcttcaggcacaactcaggacacttcaagatcatcgttcaatcaacgatattatcagccagcaacgcaaggacctctacgctactgagtcgaagtttgccgttcttgaagaggcgtcacgtacaaggaggctgtctaagcaggagcggtctctgctggcaagtaaagatcaggtgcttcagctggcgcgtcagaaagctcttctcggtgaccagattaccgctcaggagcaactgaataagcggatggatacggcgcagaagtacgttactcaaatggtggagaagcaagccgggcttgcatctggagccacaatgagtgacagacttgccgggcgacaggcatctctgtctcagctgcgcagtggctggctcaatgcgggcgggggtctcaacgatgacggttataagcgggagttaaaggccgctaacgattactacgcagcagaagacaaactacgtggagaatggatggcaggtgccagaaaaggctgggccgagtaccttgatgcggcaaccaacgtttatggctcaatgcaaagcgtagcgcagtcagccctgggcggtatatcagatatgctgacaaacctggtcactaccggaacggccagtttcaaaagtttcgccgcctccatgatgaagatgatcgctgatgtcattaaccgactgctggtggcgtacaccgtacaggctgcaatgggatggatttctgcgggtacctcatcagtaggtagtggtgcaggccagtcttttgctgtcccgtctttccggccagcgtggaacgggggatatatccctgaatttgacaccggcggttacacaggcgatggcggcaaatatcagcccaaaggggtggtacacggcggtgagttcgtttttaccaaggaggccacagctgcaatcggtgtcaataatctttatgcgatgatgcgtggtgctcagggatatgctgaaggcggggttgtcggcagggcgcccatgctggggctcatttccggttctggtaatgctgcaccggtaattaacaccactgtaaacgtcgatgccagtggtaacgcttcggctcaatccagcagctctggagacgctatggggcgcgccatggcggctgaaatacaaaacgctgcaacactggtggttcagaagcacctgaagccagggggcatgatctacaactttacgaagggtcgttag

SEQ ID NO: 922 - DNA, 340 bp, Kosakonia cowanii
  source 1..340: mol_type = genomic DNA
gatcaccactgctgacgtcatggctgaatactggaagtggcgtaagctggtattccggtacccgagcagtgagcagtatccttggccgaagacgctttactatcacatctgcctcgagttgcgtcgccgcggaaccgatggccagttgtgtcagaaagagctcgagcgcgaggccagcgatattttggatatgtgggaaaaacgggttatagccggaaagccgattccgcctgttcgtcgtgccttggcagctccagtggcttcgaatgagccaacccctgcggagcttctgaaagccaaatatgagcggatgaagtctggtgggagggcagagcgatga

SEQ ID NO: 923 - DNA, 710 bp, Kosakonia cowanii
  source 1..710: mol_type = genomic DNA
ggggtggtggtaccgaaatcacaccagaaatccagaagctgattgatgatcaggtcgcagctcaggtgaacggccttaaaaccaaaaactccgagttgctgggcacgataaagcagcagaaagacaacctttcccgctttgaaggtatcgatcctgatgccgtacgcggcatcctgcagcgattttctgacgacgaagaggcaaagctgattgccgccgggaaaattgacgaggttctggataaacgcaccgagcgcctgcgcgctgatgtcgataagcagatcaaagcggccaatgaacgcgcggacaaggccgaagccttctccggcaaattccgggatcgtgtactgggtgacgccatccgggcggcagcgtcaaaagctggcgctctgccggaagcatccgacgatctgatcttacgtgccaaaggcacgttccagctcaacgacgaaggcgaggccgtagcagttgatggaaatggcgatgttctgttcggtaaggacggcaaaacgccgttaagcccgcttgaatgggcggagtcgctcaaggagacggccccgcacctgttcccacgcgctgaaggtaccggcgcgggtggacacaaaccaggcggtggtggtagtcagaaacgttcagagatgagcgccagcgataaggcggactatatccgcaagcatggccagcaggccttcctcaaacttccgaaataa

SEQ ID NO: 924 - DNA, 483 bp, Kosakonia cowanii
  source 1..483: mol_type = genomic DNA
ttcgagaattgccagattacaattaggcgtgccagcaatgatgggctgattgtttccggaggggacaagaagaaggtcgaacatatcttgcagaaaacctggagagcgcggacgagtggttttgttaatcgcgtgaatttcactggagcagtttcaaagagtatcgctgtttgcgttcccctggctgttcccgattactgtttaccgcgtcaatacgtcgctctgggggaaatagtgtgtagtgcagatgcctttaatgcagatgatcaatggtacgacgtggtcagaagggccgataaagcagttatctatagcttcccggcggaagggagatatctggtttatcgagtaaatggaatagtttcattacgaccgctactcgaagaggaagaaatcttcactctcaacgggttttcgcaatttgcaaaacgactggggtaccgagttacaccaccatctgatatgatgatatcaacggactga

SEQ ID NO: 925 - DNA, 215 bp, Kosakonia cowanii
  source 1..215: mol_type = genomic DNA
atgtccgcacttgataaagcaattaaagccgctggctcagccagaaagctcagcatcgcgcttggtgtgactagtatgtctgtaagccattggaagaatcgcgaccacggaatcgtcccgccaagttacattttctcaattttcaaaatgacaggcgtaactccgcacgagctgcgcccagatctctacccaaacccaacagacggtttacctaa

SEQ ID NO: 926 - DNA, 141 bp, Kosakonia cowanii
  source 1..141: mol_type = genomic DNA
atgagaaaagaagaacccaaccttgttctggtgaaacgcctcactgagatcaccgatcgcggtgttaccaaagcagatatggcacgaatagctggagtcacccctcaggccgtaaacggctggttcaagaaaggcgtgatt

SEQ ID NO: 927 - DNA, 1293 bp, Kosakonia cowanii
  source 1..1293: mol_type = genomic DNA
atgatttacacaactggctctattgcagtcagcggcaacacgctgaccggcaccggcacgaatttcaccgcagcaggctccctcattcgtaacggctgcacggtgctggctctgaccagcccggcacaggctttccagattacctcagtcgacagcgcgaccagcctcacggtgtcccccgcggccagccctgcggttcccgccggcacgaagttcgccattctgctgagcgacagcctgagcgtggatggactggcacaggatatcgccgaaacgttcagcatgtatcagcgttacatgggcggtttttcggacgtgatgaatggctcgggcgatgtgaccatcaccatcaacgggacgcctgtcaccgttcccgggcagaaatcactggtccaaaagggggctaacaccgatatcaccagcctgggcgggctgacaactgcgctgagtatccagcagggcggtaccggcaaaaagaataaagacgaagcgcgcatggcattgtcagcggcctcctccggggataacaccgatatcaccagccttggcggattgaccactgcactcagcattcagcagggcggtacaggaggtaaaaccgcagcagaagcccggaataaaattggcgcggcgagctccggggataacagcgatatcacaggcatgacaggaataacggcctccctcagtggggctggcggccagccagcgggcgggataattacaaataaagtcaccaactcttcttcaaccagctacgtcgcaaaaggcatgactgtcacttacggcaccggtgcatggaccatgtatgcgacttttggtgcgcttctggatggcagcggtgtgcccggttcatgtgggccttacataggaacctatgattccaatcaattcgggacattctggtacttcctccagggcagcggtgttatcagaacaaacagcggtagtctgacaccagccgtgtcggatattcgcgtgaagaatgagaaacagatcgtccaggaagatgaggctgtcagcttcatccgggactgggagtcgatattttacacactgaagtggtctcccgataaagtccgtatcggattcagggcgcaggatatctacgcgagaaatcctgcgcttattgaacgtatcccgctctctgacggagagggaggaatgctggaagatggtatgacggttgatgtggctgaagtggcaactggctatcttgtgcccgtggtccgtaaacttctgcgggaagtcgctgaactcagagctaagattgagcatcttgaggggagctaa

SEQ ID NO: 928 - DNA, 732 bp, Kosakonia cowanii
  source 1..732: mol_type = genomic DNA
atgaacaaagctattatggccgcaatccgtgcgcatgcgctggaggaatccccgcgcgagtgctgcggcttcgttatccagtctggccgtcgccagcgctatatccccgtatcgaacacccacgaaaacccgacccagcatttccgtatcgatggcgagttctgggcgaatgctgaggacatcggtacaattatacgcgttatacattcccaccccggcgacggtgcacggcctataccgtcagacctggatcgccagcagtgcaacaactccggcgtggtctggggcatttacgcgccggacagcgatgaatacgccgagataatgcccgaggcggtgccgcttatcggccgcccgtttatcctgggttcacacgactgttgggggcttatcatggactggcatgccacgcagggcatcacgctgaacgatttccgcgttgattacccatggtgggaaagccagtaccccgacaacctctatttcgaaaactgggagccggaaggatttgtcgagtgtgccccttcgcctggctgcatggtcatcatgcaggtggagtctgataagtggaaccatgctggcatcatcaccgagaaaggtgagctgcttcatcacctgtacggccagccttcatgcattactccgtatacccgaggctatttcaaagaccgcacgatgatctgtgttcgtcacaaagacctgccacaggagattaaaccatggcacgtttaa

SEQ ID NO: 929 - DNA, 351 bp, Kosakonia cowanii
  source 1..351: mol_type = genomic DNA
atggctgttgaaacctataaatggcccgtgcaactcggagcgggctcgatcgaatataaccagacaatccgggcctcacagttcggtgatggttatgagcaggtggctgaaaatggcatcaactctactgccattcaggttccgatgatttatgtcggcaaagaggaattgataaacgaaattcgctcattcttgcttgctcataccgttaaggctttcatcatcacaccacccggcgaggagaaggggttgtatcgggtcgtcgcagactctgtgcgtaagaaccagatcagcagcaacgcagcagagcttactttcaccataaagcgcgcctacggcgtctatgcctga

SEQ ID NO: 930 - DNA, 3783 bp, Kosakonia cowanii
  source 1..3783: mol_type = genomic DNA
atggaaacgatcactggttctaagggtggtagccagaagcaacacactcctgttgagcaaccagactcagcgcagtcaatggcgcgctgtcgcttgctgctggcgctaggggagggggagtttgctggcgggctggatgcgtcaaggatttttctggacggaacccccctgggcaatgccgatgggacaatgaattttgaagacgtatcatgggattttcgctcgggcacccagacccagatgcctattcctggcttccccgctgtagaaaatgaaagcaaggtcggcgtgtcgctgacaaaagcaacgccctgggcccgcgcgctgagcaacacccagatcgacgctgtgctcatccgcattggcattcccggcctgcagcaacagcagaataacggcgatattgttggcaccactgtcaaatatcacatcgacctggccgtagacggcggcgcgttctcgccggttatgaccaggaccgttaccgagaagctcagctcgctttatgagcttactcaccgcatcaaccttcctaaagccactaccggctggcagattcgcgtggtacgcgatacggacgacagcaccagccagctgctgcagaacaaaacgcaggtgcaggccatcacagaggttatcgacgctcgtcttcgttatccgcacacagcactgttgtatgtgtcgttcaatgcaaaatcattcagcaatataccgaaaatctcctgtaaacctaaggggcgcatcatccgaatcccctcaaactacgatccgatagcccgtacttacagcggcacctgggatggcacgttcaagtggggatggtcgaacaacccggcatggatctggttcgacgttctgaccgaaccacgtttcggccttggccgccgcatcacggcggatatgctggataagtgggagctataccgtatagcccaacgttgcgatcagaaggtgcccgacggaaagggcggcagcggcaccgagccgcgctttatgtttgacgtttatatacagtctcaggccgacgcatggcaggtgatcaaggatatcgccgccgggtttaacgggatgacgttctggggcaacaacatgttcaacgttgtctctgacatgccggcggatacgtcgaaactgcagatcctcaaccgcgccgcagtgatcggcaagccggtctactcaagcggcagtgagaagacccgtttttccagcgcgctgattaatttcagcgacccggacaatcactatcaggatcgaactacggcggtgatgttcccggacctggtgaaacagttcaagtttaagcagacgcaaatcacagcgatcggctgtacgcgagagagtgaggctcagcggcgtggtggttgggcggtgtattccaactctcttgaccgcattatcaccctacaaactgggcttgatggctatgtctatgtgccgggcacggtgtttgcctttgccgatgaacgcctttctggtcgcgtgtacggtggtcgagttgccgggtacaacggcgggctgaaagctgtgacaactgatcggggtaccagcgcggttgctggcgacactctgatgattcgcacgcagggtggaaccgtcgaaagtcgggttatccaagctgtaaatggaacgcagcttgtggtgtccacgcccttcaaggcggaccctttgccgaatgcagtatttgttatagacgccgggcaattgagattacagtacttcagagtaactaacctgacgttcaatgatgaggaaaacacctactccatcacaggggcagaatataactcctctaaatatgacgcggttgataataacgcccggctggatacgccgccaatcagcctgattccgaccgggcttgttaatcagccgactaatatccgggtatcaagctttgaatcggtacgacagggccagcgcattactacactgatcgcctcctgggatgcgccacttgataaaaatggcaagcctcaggctgatgttatctcataccaggtgcaatggaagcgcggagataatgattggattaatgtgccggaaacaggactacgcaatatagaagtgcccggtatttttgagggtgactatctggtacgcgtgcgtgccatcaactcaggaggggcttcaagtctttgggcctcttcacttttgacacacctgaaggggcgcgtgggcgatgttccaaagccggtaggtctgtctgcgtcagaggatgtcgtatttggaatcaatatcacctggggttttccggccgatactgctgatacgctgagcacggaacttcagtacagcctcgctacagacggcacaaacccgatgctgctggcggctgtgccctacccgcagaaactctaccagcagatgggtctcaaggctgggcaggagttttggtaccgggccaggcttgttgaccgtaccggcaatcagtcagcctacactgactgggtacgcggccagtccagctccgatgtgacggacatcaccgaggcggtgctcgcgcagattaaggataccgaactcttcaaagacctcattgagaatgccgtggacagcagtgccaaagttgcggaactggcagaggcagtgaggcagaatgccgatggtctggccgcggctaccgggtcgaataagcagatggcggaagctattatcggtaatgccctggcgatcgcggatgtcgttgtccggcagtctgcccagcagggcgctaactccgcgaaatttgagcagctgcgcgaagttatcgccaccgaaactgaggcgcgcgttacggatgtgatccgcctggaggcaaagacggatcagaacgccgccggcatcaccgaagtacgccaggcgctggcaaacgaaaccgaggcacgggctacagctgtcgatcagcttaccgcgcagacggaagagaacagggccagtgtcacagcgctgacgcagaccgtgacggatctggactcctcgaccgcctcgcgctttgaggagatttcggcagagatcgcgggcatagacggcagtgacatcagagggggaatacagagcaactccatcgcgctgatcaccaccacgctggcgcaggttaacgatcgtacccggctcagtgtgcagtacggtgacaacaaggcgggaattgagcgtgttgataacgtgatggccgatgccagccaggctgtcgcggagtcgctcaggtcgatggatgccagttccggcgccggcacggcaaacaccaccgactttgcgaaaaccatggctgacttctcgcaggtttcggcgacaaaaattaactcgctgtctgtcacagtcaacgggcagagtgcggcgataacgcaggcatcgcaggcagtcgctgatctcagcggcaacctgaatgcgatgtacagcatcaaggtgggtgtggatgcgaacgggcgccagtacgccgcaggcatgggtatcggcgtgcagaacaccccggcgggcatgcagtcgcaggtactctttctggccgaccgtttcgccgtgatgacacaggcgggcgggacagtgagcctgccgttcctggtgcagaacgggcagacattcatcaacgaggccttcatcaattacgcgtcaatcacgctcgctcgcgtgggatcgtggtattccgccaattatgtggcggggcagaccgggaccatcatgaaggcggacgggacgtttgaggtcaacggcgcggtatcaggccagggacgcatgcagataacgaataaccgcatcatttcttacgatgcgcaaaaccggccggcagccgttatggggcaacgcttataa

SEQ ID NO: 931 - DNA, 774 bp, Kosakonia cowanii
  source 1..774: mol_type = genomic DNA
atgacagcccttattgatacggcagccatgcttgcccctggcggaaaagtccggctggtggaagtggacgcctcagaattcagtggtggtattcaccgttttcattacagtccttttccgcatactccacgggagattgacgaggcacagggtgacgaaagcaagctcgggcccaagcctgtagtcttcgatggtaaggtctatgatttctggcctttccagttaacaggcttggctctctcaactgaccaggcggcagagccgtcactcagcgtctcaaaccttgacggccatatcaccgcgctatgccttcagtttaaggacatggtgaacgcgaaggtgagcattatcgaaacctatacggtgtatctggacgcggtgaattttcccggccgcattaatcccactgccgatccgactatgttcacccttcagaccttctggctggataccaaaacgtccgaagatgacgaagtggtgacctgggggctaagtagcccggcagacctgcaggggctggtaattcccaccaggcaaattacttccctctgtgagtgggcgctacgtggtcaataccgcagtggcgacgggtgcacttacaatggcacggcatactttgatgcaaacggtaatccggtgtcagatccggcccttgatttctgcggcggctgttttagcgactgtcgtaaaaggtttggtgccgggctggcagaacctcagtctgccatccttgactttggcggttttccggcaacagttctcttctcccgataa

SEQ ID NO: 932 - DNA, 600 bp, Kosakonia cowanii
  source 1..600: mol_type = genomic DNA
atggcacgtttaacgactatccgactgtatggctcgctgggcgcccggttcggccgagtacataaactcgcagtgcagacatctgccgaagctgtaaaggctctgtgtgtcaactttgacgggctggaaggttatctgatgaatgctaaaaagaatggcatgacatttgccgtatttcgcggcaagcgaaatatcggcgtgcaggactttaaggggctggcaggcgacagtgatatccgcatcgcaccaataatggaaggggcgaaaaaggcagggatgtttcagaccattttaggggctgtaatggtggttgccggcgtgatcgtcggtgtagcgactgggtggaccggcgtcggtctcacatttggtgccgggctcatcttgtcaggggcgtcaatgatggctggcggcctatatcagatgctgtcaccacagcccaaaggattgcagggacgtgatgatccggacaataagccaagctatgcattcggtggttcagtgaatacccttgcgatggggaaccccgtcgcgttgctttacggcgagcgcgagattggcggagccattatctccgcaggtgttgtagctgaagacatctga

SEQ ID NO: 933 - DNA, 804 bp, Kosakonia cowanii
  source 1..804: mol_type = genomic DNA
atgaaacttgaatcttcattaaaacacttcagtcctcagggtatgaacatcagcgacagcgttagaggcacctctcctgacaggttgaccggtacagatgtaatggcagcgattggcaccaccagcagccgcgcgcgcttcggtcttgctgcgttctttggaaaggccgggatcagcaaaacggatgagcaaatcgcagtgcaggcgctggtgcggcacgcgatggaagttgccccgaagaatgtgcgtaaagcagctggtggcgagttgggctggtgcatgcaggtgcttgcgcagtttgcctttgctgagtatgcccgttctgcagccagcagcagcacctgcaccacctgcggcggtacgggttttttctccaggcgcgaggatgtgatcaaacaccctggcatttttgatgctgacggtgtcgagctgattgctccgaagattaaaaatgagctggttaagcatgcatgcacagcctgtggcggtaagggcatcattcctgcgcgttgccgctgtggcgggaaaggggaagtacttgatcgcgtggcaacgaaagagcggggcgcgccggtattcaaaacctgtgagcgatgctccggcaatggcttctcttcagtaccatctacggctgcgcacaagactattatccggcgcttgccagatttgcatgtcaggacatggactcgcaactggaagccatttcttgagtcgctggtggggatttgtcagcaggaagaggccaaagctgaaaaagagtttcagaatgcaaccagctttaacgaagaagagaacaaaatttag

SEQ ID NO: 934 - DNA, 786 bp, Kosakonia cowanii
  source 1..786: mol_type = genomic DNA
atgacaacagagaatctggcgcaaatgggcgccgcgcgggtggtgaggcgggttaacgccaccggaatagccgtgattgagaaagcgccggtcagcaaggttgagtacgccttctaccaccaggttgcgcccgagctaaaccgcgcggaaatccttaccccagccttgctggcagccgatgccagcacgcgcgccctcacccttgaagcgatcccctaccctgttagtcagcaaaatgtcgcgaacgacgctatcgtgtcgatgctggcacggttacaccgctttgcgccggataagaactggaactatcacccccatcgctggcccgatgcccagctggcgctgagcctgcaactgctcgccttgccggaagaggccgccagcgtgctgcgccgctgccagcgcgagagcgacagactgtttgccgaagcgggcctgatttccggcgacagtaatgctggcaactgggggcaacgcgagaacggcgagtttgtgctgtttgactgggagcggttcagcaccggtcacccggccattgatttagccccgctgattaaaggtatgggtacgcctgaagagtatcgacacctcgcggcgcgctactgccgatttaatccgcggtcagaaaatgatctcgctcgcgatattgccttagcgaaagcgtggattgtcagcgaagtgattacgctccttcacaagcgacagaaagcggattttccgcgttttcagcactggtatcgcagctatttgcccgactggctgagggaagtggaaaaaatgaagtga

SEQ ID NO: 935 - DNA, 1542 bp, Kosakonia cowanii
  source 1..1542: mol_type = genomic DNA
gtgaaatttaacctgttactgacgctggctgcggccgggttaggcttttcctgcgcggcaaacgcaacgtgggatgagaagttctggaatccaaaacccttggctgatgatgtgatcctgccgctgccctgcgatggcgcaatggcgtttcgtaaggttgctattcctctggataagccgttagccgattacagcattacgcttggcgaagagggtaacgagtggggctatatcgaacagtcacgcccggaccatatcgccggtagcttcccgcaagagaagaaagagaaaggccgttactacctgatggccaaatatgagctgacggatttgcagtatcgcgcactctccggtgattgcgccaaacccgatatcaaaggtcgtctgccgaaggtcaatatcggctggatggacgccatgtcgattgccgataaatacaacctgtggctgcgaaaagagaagccggacgcactgccgcaggatgataagcagccgggctttttacgtctgccgacggaaaccgaatgggagtttgccgcgcgcggcgggctgtctgtctcgtcggcggagtttcgcgatcgccacttcccgatgccggaaggcctgaatggctatgtctggttcgcgggggcgcagtcagcaaataacaaacttcagcttaccggcctgcttaaaccgaacccgctgggtctgcacgatatgctcggcaacgttggcgaaatgatgtttgagccgtttcgcttaaataaacttgaccgcctgcatggcaaagcgggcggctatatcgtgcgcggcggcagctacttaacgccgcaggccgatattcgcagttcgctgcgcggggaagagccctattacaccgcgcaaggtgagaacagcagcaaagcgaacggcatgcgcctggtactggtctcaaccaccctcacctcgcgggatcgcatcaaagagattgaaaaagagtggcaggcgctgggtaccgagagcaaagcggcgaagaaaccgggcgaaggcgcggactcattacagaacctgaatgccatctccgccaaagtgcaggatgagggcgtgaaaaaggagctggagtcgctgcgtaatgaactgcgagccaatagtcagctgcgcgatgagcagcgcgaccaggcgatccgcacctctttgcagttgggcgcctttttgtgcaccaagatgaaagatgacggcgagtttctcgatcgccttaaccagctttatagcaaaacgtgtgccgccgggagccagctggatgccaactgttcgcgtcgccaggagcagctcgatcagcataaaaaagcgctggagtttatcaccagctattacgccgacacgctggtggatatgggcaccacctataacaagagcctgatcgatccgcagatgaccgtcgttcagcaacagatggcggcgcgcggtaaaaccaatctgaatggttacctgaatacctactggggcaaccttcagggctactggaaagatggcaaagtggcgcgagatgcgtggctgagcgcttgtaaaaaaaataattaa

SEQ ID NO: 936 - DNA, 1953 bp, Kosakonia cowanii
  source 1..1953: mol_type = genomic DNA
atgaaaacgagagtctggctgggcggattcctgtgcttaacggccgccaccatgggcgcgcacgccgccgatcaaaaaccgctgctgcaggaggggaaacatagcctttatcagcgtgttctcacctacccgggctgccagctggcaccgaaagcgggcgaggccggtaaagagcagccggcgtttagccgcttctacgtttatcagcgtagcaagcagggccaggatgagtggttgcaggtgggaccggatagcttcggtcatgtttccggctggcttaaagccgcctgtaccgtcgactggaagatgcagctcacgctggcctttaccaacccggcgggtcgccacccgatgctctttttccgcgataagagcgacgtcgaatcgttgctgaataaccctaaaccggccgccgcgctcgatccgttattggccaatctgaagagcaataaacccgtgccgcaggtgctggcgaaagagccggattacatggtcgatcagcagaaaaacttctacctgctgccagtgttaggctctgacgatgtctttaccgacagcggtttccaggtgcgcgtgcttaatgttgcctcggtcagtgaaaaagcgccggagaaagcggcaaaagcggctgacgagaagaacatgatgaagggcttttcggcgtcggtggtgtttgtaatcgactccaccatttcgatgggcccctatatcgaccgcaccaaagaggcgatcgataagatctatcagcgcattgaaaaggagcacctccaggatcaggtgaagttcgggctggtggccttccgctctaatgtcaaagccgtgccggggctggagtatgacagcaagatgtatgtcgaccccaatacggtgaaagatggcaaagatttcctcgccaaagtacacgatctcaagcaagccacggtctccagcagcaaagtggatgaggatgcttatggcggtgtgatgacggcgcttgataaggtcgactggacgcagtttggcgcacgttacgtgatcctgattaccgacgccggcgcgctggagggcggagataacctctcctctacacatcttgatgccgcacaggttcgccaggaagcggcctatcgtggtgtggcgctttataccctgcatctcaaaaccccgagcggtaagaaaaaccatgctgctgccgaggcgcagtatcaggatctgacgctcaacccgttcctgcataaaccgctctactacccgatcgactccggcgatgtgaacaacttcggcaccatggtcgatagcctggctaacgccatcaccggccagatcaaaaccgcctggagcggggaagagacggcgggcagcgcgctgggcgccagcgaagagtatgccggtaagaaagccgacccgctgctgagcgatgcggacaagctgagcaaagcaatgcgccttgcctatctcggcgagaaacagggaacccaggcaccgccggtgtttaaatcctggattagcgatcgcgatttggtgaaccagaacattcccgccaccgaagtgcgtgtcctgctgaccaaaagcgagttgagcgatctgagcgatgtgatgaagaagatcgtcaacgccgccaacgaagggttgatctcgccggacgatatgttcgccagcctgcgttcgctggccgcaacgatgggcaacgatccgaaccaggcgaaaagcaaaaatgccacacgcttaggtgaattgggtctgctgggtgaatacatcgaagggctgccgtacctgagtgaagtgctgagccttgatgaagagacctggaagagctgggatggccttgagcaggagcgatttattcgccgtctcaataccaagctgaactactaccaacgctataaccaggatgttgaccgctggatctcgctggcaccggacagcgatccgcgtgacaacgtctaccctgtgccgctggaaaacctgccgtaa

SEQ ID NO: 937 - DNA, 1233 bp, Kosakonia cowanii
  source 1..1233: mol_type = genomic DNA
gtgtcttccagcctgcctgaaacgcgccccaggatggggctactgctaaatatggcgctgcgcgatctgatacacgatcggaaagtggcgctctgtattgtcttctcgctgatcgcggtgatcgccccgctacttctcctgtttggcttaaagaacggtatcgtcagccagctgcgccacgatctgctcgacgatccacgcacgcgggaagtgcggatgaccggcaacggtaactacgatcttgcgtggctcaatgcgctcgcggcacgcccggaggttggcttctcaataccgcttacgcgatcgctgaatacccaggcagacctggtgcgcgacgggcaacattttgccgctggtgcagaggtgatcccttccgcgaaaggcgatccgctgctgcgcgagagcggagtgctgccgcacggcagcacggtggtactgagcaacagcgccgcccgtaagctcgacgtgaaagcgggcgacacgttccggctgtttatcagccgtaaacgcgacgggcagaaccagcgcacatcgctctctgtcagtgttggtgccattctcgacgaggcgcgctttgcccgccctgcgctatttgtcgacctgcctctgctggtagcgctggaggattatcgcgacggtttccaggtgccgctgctcggcgttaccgacggtgaaaacgcgcgcgagcggcataactttgcgcgggcgcggctctatgccgccacgctggatgatgttgcacccctggcgcaatggcttgagtcgcagcatatcgaagcgataacccaggccgcgcagattgaagcggtgcgcgccatcgatcgcgtgctgggggtgattttcgcggtgatcgcctggatctcggcctcaggctgcattgcgtcgcttattggcgcgtttatcgccaatatcgatcgtaaacgcaaagatatggcagtgctgcgcctgctcggttttcgccgccaggcggtgacgctgttcatcatgatccaggcgctctgcctgacgggcgttgcgtttattgctggcctgttgatttatggcgcgggcagcgcgctgtttaaccaccttctgggcgctaatctccccgaaagcgcttttgtttgtcaccttgatcctggccactttgccgccgccttcctgagcgtgctggccgtggcgctgggcgttgccgcgattggcgcgctgcgggcgttaaagatcgaacctgcggagagtttacgtgaaatttaa

SEQ ID NO: 938 - DNA, 786 bp, Kosakonia cowanii
  source 1..786: mol_type = genomic DNA
atgacaacagagaatctggcgcaaatgggcgccgcccgggtggtgaagcgggttaacgcctccggaatagccgtgattgagaaagcgccggtcagcaaggttgagtacgccttctaccaccaggttgcgcccgagctaaaccgcgcggaaatttttactccagccttactggcagccgatgccagcacgcgcgtcctcacccttgaagcgatcccctaccctgttagccagcaaaatgtcgcaaacgacgccatcgtgtcgatgctggcgcgcttacaccgctttgcgccggataaaaactggcactatcacccccatcgctggcccgacgcgcagctggcgctgagcctgcacctgctcgctttgccggaagcagccaccagagcgctgcgccgctgccagcgcgacagcgacaggctgtttgccgaagcgggcctgatttccggcgacagtaacgccggcaactgggggcagcgcgagaacggcgagtttgtgctgtttgactgggagcggttcagcaccggtcacccggccattgatttagccccgctgattaaaggcatgggcacgcctgaagagtatcgacacctcgcggcgcgctactgccgatttaatccgcggtcagaaaacgatctcacacgcgatattgccttagcgaaagcgtggattgtcagcgaagtgattacgctccttcacaagcgacagaaagcggattttccgcgttttcagcactggtatcgcagctatttgcccgactggcttaaggaagtggaaaaaatcatttga

SEQ ID NO: 939 - DNA, 1953 bp, Kosakonia cowanii
  source 1..1953: mol_type = genomic DNA
atgaaaacgagagtctggctgggcggattcctgtgcttaacggccgccaccatgggcgcgcacgccgccgatcaaaaaccgctgctgcaggaggggaaacatagcctttatcagcgtgttctcacctacccgggctgccagctggcaccgaaagcgggcgaggccggtaaagagcagccggcgtttagccgcttctacgtttatcagcgcagcaagcagggccaggatgagtggctgcaggtgggaccggatagcttcggtcatgtttccggctggcttaaagccgcctgtaccgtcgactggaagatgcagctcacgctggcgtttaccaacccggcgggtcgccacccgatgctctttttccgcgataagagcgacgtcgaatcgttgctgaataacccaaaaccggctgccgcgctcgatccattattggccaatctgaagagcaataaacccgtgccgcaggtgctggcgaaagagccggattacatggtcgatcagcagaaaaacttctatctgctgccagtgttaggctctgacgatgtctttaccgacagcggtttccaggtgcgcgtgcttaatgtcgcctcggtcagtgaaaaagcgccggagaaagcggcaaaagcggctgacgagaagaacatgatgaagggcttttcggcgtcggtagtgtttgtaatcgactccaccatttcgatgggcccctatatcgaccgcaccaaagaggcgatcgataagatctatcagcgcattgaaaaggagcatctccaggatcaggtgaagtttggtttggtggccttccgctccaatgtcaaagccgtgccggggctggagtatgacagcaagatgtacgtcgaccccaacacggtgaaagatggcaaagatttcctcgccaaagtacacgatctgaagcaagccacggtctccagtagcaaagtggaagaggatgcttatggcggcgtgatgacggcgcttgataaggtcgactggacgcagtttggcgcgcgttacgtgatcctgattaccgacgccggcgcgctggagggcggggataacctctcctccacgcatcttgatgccgcgcaggttcgccaggaagcggcctaccgtggtgtggcgctctataccctgcatctcaaaaccccgagcggtaagaaaaaccatgccgccgccgaggcgcagtatcatgatctaacgctcaacccgttcctgcataaaccgctctactacccgatcgactccggcgatgtgaacaacttcggcgccatggtcgatagcctggcgaatgccatcaccggccagattaaaaccgcctggagcggcgaagagacggcgggcagcgcgctgggtgccagcgaagagtatgccggtaagaaagccgacccgctgctgagcgatgcggacaagctgagcaaagcgatgcgccttgcctatctcggcgaaaaacaggggacccaggcaccgccggtgtttaaatcctggatcagcgaccgcgatttagtgaaccagaacattcccgccaccgaagtgcgtgtcctgctgaccaaaagcgagctgagcgatctgagtgatgtgatgaagaagatcgtcaatgccgccaacgaagggttgatctcgccggacgatatgttcgccagcctgcgttcgctggccgcaacgatgggcaacgatccgaaccaggcgaaaagcaaaaacgccacacgtctgggtgaattgggtctgctgggtgaatacattgaagggttgccgtacctgagtgaagtactaagccttgatgaagagacctggaagagctgggatggccttgagcaggagcggtttattcgccgtctcaataccaagctgaactactaccagcgctataaccaggatgttgaccgctggatctcgctggcaccggacagcgatccgcgtgacaacgtctaccctgtgccgctggaaaacctgccgtaa

SEQ ID NO: 940 - DNA, 1233 bp, Kosakonia cowanii
  source 1..1233: mol_type = genomic DNA
gtgtcttccagcctgcctgaaactcgccccaggatggggctactgctaaatatggcgctgcgcgatctgatccacgatcgaaaagtggcgctctgtattgtcttctcgctgatcgcggtgatcgccccgctacttctcttgtttggcttaaaaaacggtatcgtcagccagctgcgccacgatctgcttgacgatccacgcacgcgggaagtgcggatgaccggcaacggtaactacgatcttgcgtggctcaatgcgctcgcggcacgcccggaggttggcttctcaataccgcttacgcgatcgctgaatacccaggcagacctggtgcgcgacgggcaacattttgccgctggtgcagaggtgatcccttccgcgaaaggcgatccgctgctgcgtgagagcggagtgctgccgcacggcagcaccgtggtactgagcaacagcgctgcccgtaagctcgacgtgaaagcgggcgacacgttccggctgtttgtcagccgtaaacgcgacgggcagaaccagcgcacatcgctctccgtcagcgtcggtgccattctcgacgaggcgcgctttgcccgccctgcgctgtttgtcgacctgcctctgctggtggcgctggaagattatcgcgacggtttccaggcgccgctgctcggcgttaccgacggtgaaaacgcgcgcgagcggcataactttgcgcgcgcacggctctatgccgccacgctggatgatgttgcccccctggcgcaatggcttgagtcgcaacatatcgaagcgataacccaggccgcgcagattgaagcggtgcgcgccatcgatcgcgtgctgggggtgattttcgcggtaatcgcctggatctcggcctcaggctgcattgcgtcgcttattggcgcgtttatcgccaatatcgatcgtaaacgcaaagatatggcagtgctgcgcctgctcggttttcgccgccagacggtgacgctgtttatcatgatccaggcgctctgcctgacgggcgttgcgtttattgctggcctgttgatttatggcgcgggcagcgcgctgtttaaccaccttctgggcgctaatctccccgaaagcgcttttgtttgtcaccttgatcctggccactttgccgccgccttcctgagcgtgctggccgtggcgctgggcgttgccgcaattggcgcgctgcgggcgttaaagatcgaacctgcggagagtttacgtgaaatttaa

SEQ ID NO: 941 - DNA, 1542 bp, Kosakonia cowanii
  source 1..1542: mol_type = genomic DNA
gtgaaatttaacctgttactgacgctggctgcggccgggttaggcttttcctgcgcggcaaacgcaacgtgggatgagaagttctggaacccaaaacccctggccgatgatgtgatcctgccgctgccctgcgatggcgcaatggcgtttcgtaagattgctattcctctggataagccgttagccgattacagcattacgcttggcgaagagggcaacgagtggggctatatcgaacagtcacgcccggaccatatcgccggtagcttcccgcaagagaagaaagagaaaggccgttactacctgatggccaaatatgagctgacggatttgcagtatcgcgcactttccggtgattgcgccaaacccgatatcaaaggtcgtctgccgaaggtcaatatcggctggatggacgccatgtcgattgccgataaatacaacctgtggctgcgaaaagagaagccggacgcgctgccgcaggatgataagcagccaggctttttacgtctgccgacggaaaccgaatgggagtttgccgcgcgcggcgggctatctgtctcgtcggcggagtttcgcgatcgccacttcccgatgccggaaggcctgaatggctatgtctggttcgcgggggcgcagtcagcgaataacaaactccagcttaccggcctgcttaaaccgaacccgctgggtctgcacgatatgcttggtaacgctggcgaaatgatgtttgagccgtttcgcttaaataaacttgaccgcctgcatggcaaagcgggcggctatatcgtgcgcggcggcagttacttaacgccgcagaccgatatccgcagctcgctgcgcggggaagagccctattacaccgcgcaaggtgaaaacagcagcaaagcgaacggcatgcgcctggtactggtctcaaccaccctcacctcgcgggatcgcattaaagagattgaaaaagagtggcaggcgctgggtaccgagagcaaagcggcgaagaaaccgggcgaaggcgcggactcattacagaacctgaatgctatctccgccaaagtgcaggatgaaggtgtgaaaaaggagctggagtcgctgcgtaatgaactgcgagccaatagccagctgcgcgatgagcagcgcgaccaggcgatccgcacctctttgcagctgggcgcctttttgtgcaccaagatgaaagatgacggcgagtttctcgatcgccttaatcagctttatagcaaaacgtgtgccgccgggagccagctcgacgccaactgttcgcgtcgccaggagcagctcgatcagcataaaaaagcgctggagtttatcaccagctattacgccgacacgctggtggatatgggcacgacctataacaagagcctgatcgatccgcagatgaccgtcgtgcagcagcagatggcggcgcgcggtaaaaccaatctaaacggttacctgaatacctactggggcaatcttcagggctactggaaagatggcaaagtggcgcgcgatgcgtggctgagcgcttgtaaaaaaaataattaa

SEQ ID NO: 942 - DNA, 231 bp, Kosakonia cowanii
  source 1..231: mol_type = genomic DNA
atgtccttaccgtggagcatcgatgacagcagagaatctggcgcaaatgggcgccgtaatccgcggtcagaaaacgatctcgcacgcgatattgccttagcgaaagcgtggattgtcagcgaagtgattacgctccttcacaagcgacagaaagcggattttccgcgttttcagcactggtatcgcagctatttgcccgactggcttaagcagatcgaaaccgttatctga

SEQ ID NO: 943 - DNA, 1233 bp, Kosakonia cowanii
  source 1..1233: mol_type = genomic DNA
gtgtcttccagcctgcctgaaacgcgccccaggatggggctactgctaaatatggcgctgcgcgatctgatacacgatcggaaagtggcgctctgtattgtcttctcgctgatcgcggtgatcgccccgctacttctcctgtttggcttaaagaacggtatcgtcagccagctgcgccacgatctgctcgacgatccacgcacgcgggaagtgcggatgaccggcaacggtaactacgatcttgcgtggctcaatgcgctcgcggcacgcccggaggttggcttctcaataccgcttacgcgatcgctgaatacccaggcagacctggtgcgcgacgggcaacattttgccgctggtgcagaggtgatcccttccgcgaaaggcgatccgctgctgcgcgagagcggagtgctgccgcacggcagcacggtggtactgagcaacagcgccgcccgtaagctcgacgtgaaagcgggcgacacgttccggctgtttatcagccgtaaacgcgacgggcagaaccagcgcacatcgctctccgtcagcgtcggtgccattctcgacgaggcgcgctttgcccgccctgcgctatttgtcgacctgcctctgctggtggcgctggaagattatcgcgacggtttccaggtgccgctgctcggcgttaccgacggtgaaaacgcgcgcgagcggcataactttgcgcgggcgcggctctatgccgccacgctggatgatgttgcatccctggcgcaatggcttgagtcgcagcatatcgaagcgataacccaggccgcgcagattgaagcggtgcgcgccatcgatcgcgtgctgggggtgattttcgcggtgatcgcctggatctcggcctcgggctgcattgcgtcgcttattggcgcatttatcgccaatatcgatcgtaaacgcaaagatatggcagtgctgcgcctgctcggttttcgccgccaggcggtgacgctgttcatcatgatccaggcgctctgcctgacgggcgttgcgtttatcgctggcctgttgatttatggcgcgggcagcgcgctgtttaaccaccttctgggcgctaatctccccgaaagcgcttttgtttgtcaccttgatcctggccactttgccgccgccttcctgagcgtgctggccgtggcgctgggcgttgccgcgattggcgcgctgcgggcgttaaagatcgaacctgcggagagtttacgtgaaatttaa

SEQ ID NO: 944 - DNA, 786 bp, Kosakonia cowanii
  source 1..786: mol_type = genomic DNA
atgacaacagagaatctggcgcaaatgggcgccgcgcgggtggtgaagcgggttaacgccaccggaatagccgtgattgagaaagcgccggtcagcaaggttgagtacgccttctaccaccaggttgcgcccgagctaaaccgcgcggaaatccttaccccagcgttgctggcagccgatgccagcacgcgcgccctcacccttgaagcgattccctaccctgttagccagcaaaatgtcgcgaacgacgctatcgtgtcgatgctggcacggttacaccgctttgcgccggataaaaactggcactatcacccccatcgctggcccgatgcccagctggagctgagcctgcaactgctcgccttgccggaagaggccgccagagtgctgcgccgctgccagcgcgagagcgacagactgtttgccgaagcgggcctgatttccggcgacagtaatgctggcaactgggggcaacgcgagaacggcgagtttgtgctgtttgactgggagcggttcagcaccggtcacccggccattgatttagccccgctgattaaaggcatgggcacgcctgaggagtatcgacacctcgcggcgcgctactgccgatttaatccgcggtcggaaaacgatctcgctcgcgatattgccttagcgaaagcgtggattgtcagcgaagtgattacgctccttcacaagcgacagaaagcggattttccgcgttttcagcactggtatcgcagctatttgcccgactggcttaagcagacaggaacacttatctga

SEQ ID NO: 945 - DNA, 786 bp, Kosakonia cowanii
  source 1..786: mol_type = genomic DNA
atgacaacagagaatctggcgcaaatgggcgccgcccgggtggtgaagcgggttaacgccaccggaatagccgtgattgagaaagcgccggtcagcaaggttgagtacgccttctaccaccaggttgcgcccgagctaaaccgcgcggaaatccttaccccagccttgctggcagccgatgccagcacgcgcgccctcacccttgaagcgattccctaccctgttagtcagcaaaatgtcgcgaacgacgctatcgtgtcgatgctggcacggttacaccgctttgcgccggataaaaactggcactatcacccccatcgctggcccgacgcgcagctggcgctgagcctgcaactgctcgccttaccggaagaggccgccagagtgctgcgccgctgccagcgcgagagcgacagactgtttgccgaagcgggcctgatttccggcgacagtaatgctggcaactgggggcaacgcgagaacggcgagtttgtgctgtttgactgggagcggttcagcaccggtcacccggccattgatttagccccgctgattaaaggtatgggtacgcctgaagagtatcgacacctcgcggcgcgctactgccgatttaatccgcggtcagaaaatgatctcgctcgcgatattgccttagcgaaagcgtggattgtcagcgaagtgattacgctccttcacaagcgacagaaagcggattttccgcgttttcagcactggtatcgcagctatttgcccgactggctgagggaagtggaaaaaatgaagtga

SEQ ID NO: 946 - DNA, 1542 bp, Kosakonia cowanii
  source 1..1542: mol_type = genomic DNA
gtgaaatttaacctgttactgacgctggctgcggccgggttaggcttttcctgcgcggcaaacgcaacgtgggatgagaagttctggaacccaaaacccttggctgatgatgtgatcctgccgctgccctgcgatggcgcaatggcgtttcgtaaggttgctattcctctggataagccgttagccgattacagcattacgcttggcgaagagggtaacgagtggggctatatcgaacagtcacgcccggaccatatcgccggtagcttcccgcaagagaagaaagagaaaggccgttactacctgatggccaaatatgagctgacggatttgcagtatcgcgcactctccggtgattgcgccaaacccgatatcaaaggtcgtctgccgaaggtcaatatcggctggatggacgccatgtcgattgccgataaatacaacctgtggctgcgaaaagagaagccggacgcactgccgcaggatgataagcagccgggctttttacgtctgccgacggaaaccgaatgggagtttgccgcgcgcggcgggctgtctgtctcgtcggcggagtttcgcgatcgccacttcccaatgccggaaggcctgaatggctatgtctggttcgcgggggcgcagtcagcaaataacaaacttcagcttaccggcctgcttaaaccgaacccgctgggtctgcacgatatgctcggcaacgttggcgaaatgatgtttgagccgtttcgcttaaataaacttgaccgcctgcatggcaaagcgggcggctatatcgtgcgcggcggcagctacttaacgccgcaggccgatattcgcagttcgctgcgcggggaagagccctattacaccgcgcaaggtgagaacagcagcaaagcgaacggcatgcgcctggtactggtctcaaccaccctcacctcgcgggatcgcatcaaagagattgaaaaagagtggcaggcgctgggtaccgagagcaaagcggcgaagaaaccgggcgaaggcgcggactcattacagaacctgaatgccatctccgccaaagtgcaggatgagggcgtgaaaaaggagctggagtcgctgcgtaatgaactgcgagccaatagccagctgcgggatgagcaacgcgaccaggcgatccgcacctctttgcagctgggcgcctttttgtgcaccaagatgaaagatgacggcgagtttctcgatcgccttaaccagctttatagcaaaacgtgtgccgccgggagccagctggatgccaactgttcgcgtcgccaggagcagctcgatcagcataaaaaagcgctggagtttatcaccagctattacgccgacacgctggtggatatgggcacaacctataacaagagcctgatcgatccgcagatgaccgtcgttcagcaacagatggcggcgcgcggtaaaaacaatctgaatggttacctgaatacctactggggcaaccttcagggctactggaaagatggcaaagtggcgcgagatgcgtggttgagcgcttgtaaaaaaaataattaa

SEQ ID NO: 947 - DNA, 1953 bp, Kosakonia cowanii
  source 1..1953: mol_type = genomic DNA
atgaaaacgagagtctggctgggcggattcctgtgcttaacggccgccaccatgggcgcgcacgccgccgatcaaaaaccgctgctgcaggaggggaaacatagcctttatcagcgtgttctcacctacccgggctgccagctggcaccgaaagcgggcgaggccggtaaagagcagccggcgtttagccgcttctacgtttatcagcgtagcaagcagggccaggatgagtggttgcaggtggggccggatagcttcggtcatgtttccggctggcttaaagccgcctgtaccgtcgactggaagatgcagctcacgctggcctttaccaacccggcgggtcgccacccgatgctctttttccgcgataagagcgacgtcgaatcgttgctgaataaccctaaaccggccgccgcgctcgatccgttattggccaatctgaagagcaataaacccgtgccgcaggtgctggcgaaagagccggattacatggtcgatcagcagaaaaacttctacctgctgccagtgttaggctctgacgatgtctttaccgacagcggtttccaggtgcgcgtgcttaatgtcgcctcggtcagtgaaaaagcgccggagaaagcggcaaaagcggctgacgagaagaacatgatgaagggcttttcggcgtcggtggtgtttgtaatcgactccaccatttcgatgggtccctatatcgaccgcactaaagaggcgatcgataagatctatcagcgcattgaaaaggagcacctccaggatcaggtgaagttcggtctggtggccttccgctctaatgtcaaagccgtgccggggctggagtatgacagcaagatgtatgttgaccccaatacggtgaaagatggcaaagatttcctcgccaaagtacacgatctgaagcaagccacggtctccagcagcaaagtggatgaggatgcttatggcggtgtgatgacggcgcttgataaggtcgactggacgcagtttggcgcacgttacgtgatcctgattaccgacgccggcgcgctggagggcggagataacctctcctccacgcatcttgatgccgcacaggttcgccaggaagcggcctatcgtggtgtggcgctttataccctgcatctcaaaaccccgggcggtaagaaaaaccatgctgctgccgaggcgcagtatcaggatctgacgctcaacccgttcctgcataaaccgctctactacccgatcgactccggcgatgtgaacaacttcggcaccatggtcgatagcctggcgaacgccatcaccggccagatcaaaaccgcctggagcggggaagagacggcgggcagcgcgctgggcgccagcgaagagtatgccggtaagaaagccaacccgctgctgagcgatgcggacaagctgagcaaagcgatgcgccttgcctatctcggtgaaaaacaggggacccaggcaccgccggtatttaaatcctggatcagcgatcgcgatttggtgaaccagaacattcccgccactgaagtgcgtgtcctgctgaccaaaagcgagttgagcgatctgagcgatgtgatgaagaagatcgtcaacgccgccaacgaagggttgatctcgccggacgatatgttcgccagcctgcgttcgctggccgcaacgatgggcaacgatccgaaccaggcgaaaagcaaaaatgccacacgcttaggtgaattgggtctgctgggtgaatacatcgaagggctgccgtacctgagtgaagtgctgagccttgatgaagagacctggaagagctgggatggccttgagcaggagcgatttattcgccgtctcaataccaagctgaactactaccagcgctataaccaggatgttgaccgctggatctcgctggcaccggacagcgatccgcgtgacaacgtctaccctgtaccgctggaaaacctgccgtaa

SEQ ID NO: 948 - DNA, 786 bp, Kosakonia cowanii
  source 1..786: mol_type = genomic DNA
atgacaacagagaatctggcgcaaatgggtgccgcccgggtggtgaagcgggttaacgccgccgggatagccgtgattgagaaagtgccggtcagtaaggttgagtacgccttctaccaccaggttgcgcccgagctaaaccgcgcggaaatttttactccagccttgctggcagccgatgccagcacgcgcgccctcacccttgaagcgatcccctaccctgttagccagcaaaatgtcgcaaacgacgccatcgtgtcgatgctggcgcgcttacaccgctttgcgccggataaaaactggcactaccacacccatcgctggcccgacgcgcagctggagctgagcctgcacctgctcgctttgccggaagcagccgccagagcgctgcgccgctgccagcgcgacagcgacaggctgtttgccgaagcgggcctgatttccggcgacagcaacgccggcaactgggggcagcgcgaaaacggcgagtttgtgctgtttgactgggagcggttcagcaccggtcacccggccattgatttagccccgctgattaaaggcatgggcacgcctgaagagtatcgacacctcgcggcgcgctactgccgatttaatccgcggtcagaaaacgatctcacacgcgatattgccttagcgaaagcgtggattgtcagcgaagtgattacgctccttcacaagcgacagaaagcggattttccgcgttttcagcactggtatcgcagctatttgcccgactggctgagggaagtggaaaaaatgatgtga

SEQ ID NO: 949 - DNA, 1542 bp, Kosakonia cowanii
  source 1..1542: mol_type = genomic DNA
gtgaaatttaacctgttactgacgctggctgcggccgggttaggcttttcctgcgcggcaaacgcaacgtgggatgagaagttctggaacccaaaacccctggccgatgatgtgatcctgccgctgccctgcgatggcgcaatggcgtttcgtaaggttgctattcctctggataagccgttagccgattacagcattacgcttggcgaagagggcaacgagtggggctatatcgaacagtcacgcccggaccatatcgccggtagcttcccgcaagagaagaaagagaaaggccgttactacctgatggccaaatatgagctgacggatttgcagtatcgcgcactttccggtgattgcgccaaacccgatatcaaaggtcgtctgccgaaggtcaatatcggctggatggacgccatgtcgattgccgataaatacaacctgtggctgcgaaaagagaagccggacgcactgccgcaggatgataagcagccaggctttttacgtctgccgacggaaaccgaatgggagtttgccgcgcgcggcgggctatctgtctcttcggcggagtttcgcgatcgccacttcccgatgccggaaggcctgaatggctatgtctggttcgcgggggcgcagtcagcgaataacaaactccagcttaccggcctgcttaaaccgaatccgctgggtctgcacgatatgcttggtaacgctggcgaaatgatgtttgagccgtttcgcttaaataaacttgaccgcctgcatggcaaagcgggcggctatatcgtgcgcggcggcagctacttaacgccgcaggccgatatccgcagctcgctgcgcggggaagagccctattacaccgcgcaaggcgagaacagcagcaaagcgaacggcatgcgcctggtactggtctcaaccaccctcacctcgcgggatcgcattaaagagattgaaaaagagtggcaggcgctgggtaccgagagcaaagcggcgaagaaaccgggcgaaggcgcggactcattacagaacctgaatgctatctccgccaaagtgcaggatgaaggtgtgaaaaaggagctggagtcgctgcgtaatgaactgcgagccaatagccagctgcgcgatgagcagcgcgaccaggcgatccgcacctctttgcaactgggcgcctttttgtgcaccaagatgaaagatgacggcgagtttctcgatcgccttaatcagctttatagcaaaacgtgtgccgccgggagccagctcgatgccaactgttcgcgtcgccaggagcagctcgatcagcataaaaaagcgctggagtttatcaccagctattacgccgacacgctggtggatatgggcacgacctataacaagagcctgatcgatccgcagatgaccgtcgtgcagcagcagatggcggcgcgcggtaaaaccaatctaaacggttacctgaatacctactggggcaatcttcagggctactggaaagatggcaaagtggcgcgcgatgcgtggctgagcgcttgtaaaaaaaataattaa

SEQ ID NO: 950 - DNA, 1953 bp, Kosakonia cowanii
  source 1..1953: mol_type = genomic DNA
atgaaaacgagagtctggctgggcggatttctgtgcttaacggccgccactatgggcgcgcacgccgccgatcaaaaaccgctgctgcaggaggggaaacatagcctttatcagcgtgttctcacctacccgggctgccagctggcaccgaaagcgggcgaggccggtaaagagcagccggcgtttagccgcttctacgtttatcagcgcagcaagcagggccaggatgagtggctgcaggtcgggccggatagcttcggtcatgtttccggctggcttaaagccgcctgtaccgtcgactggaagatgcagctcacgctggcgtttaccaacccggcgggtcgccacccgatgctctttttccgcgataagagcgacgtcgaatcgttgctgaataacccaaaaccggctgccgcgctcgatccgttattggccaatctgaagagtaataaacccgtcccgcaggtgctggcgaaagagccggattacatggtcgatcagcagaaaaacttctatctgctgccagtgttaggctctgacgatgtctttaccgacagcggtttccaggtgcgcgtgcttaatgtcgcctcggtcagtgaaaaagcgccggagaaagcggcaaaagcggctgacgagaagaacatgatgaagggcttttcggcgtcggtagtgtttgtaatcgactccaccatttcgatgggcccctatatcgaccgcaccaaagaggcgatcgataagatctatcagcgcattgaaaaggagcatctccaggatcaggtgaagtttggtctggtggccttccgctccaatgtcaaagccgtgccggggctggaatatgacagcaagatgtacgtcgaccccaacacggttaaagatggcaaagatttcctcgccaaagtacacgatctgaagcaagccacggtctccagtagcaaagtggaagaggatgcttatggcggcgtgatgacggcgcttgataaggtcgactggacgcagtttggcgcgcgttacgtgatcctgatcaccgacgccggcgcgctggagggcggggataacctctcctccacgcatcttgatgccgcgcaggttcgccaggaagcggcctaccgtggtgtggcgctctataccctgcatctcaaaaccccgagcggtaagaaaaaccatgccgccgccgaggcgcagtatcaggatctgacgctcaacccgttcctgcataaaccgctctactacccgatcgactccggcgatgtgaacaacttcggcgctatggtcgatagcctggcgaatgccatcaccggccagattaaaaccgcctggagcggcgaagagacggcgggcagcgcgctgggtgccagcgaagagtatgccggtaagaaagccgacccgctgctgagcgatgcggacaagctgagcaaagcgatgcgccttgcctatctcggcgaaaaacaggggacccaggcaccgccggtgtttaaatcctggatcagcgaccgcgatttagtgaaccagaacattcccgccaccgaagtgcgtgtcctgctgaccaaaagcgagctgagcgatctgagtgatgtgatgaagaagatcgtcaatgccgccaacgaagggttgatctcgccagacgatatgttcgccagcctgcgttcgctggccgcaacgatgggcaacgatccgaaccaggcgaaaagcaaaaacgccacgcgcttaggtgaattggggctgctgggtgaatacattgaagggctgccgtacctgagtgaagtactgagccttgatgaagagacctggaagagctgggatggccttgagcaggagcggtttattcgccgtctcaataccaagctgaactactaccagcgctataaccaggatgttgaccgctggatctcgctggcaccggacagcgatccgcgtgacaacgtctaccctgtgccgctggaaaacctgccgtaa

SEQ ID NO: 951 - DNA, 1233 bp, Kosakonia cowanii
  source 1..1233: mol_type = genomic DNA
gtgtcttccagcctgcctgaaactcgccccaggatggggctactactgaatatggcgctgcgcgatctgatccacgatcgaaaagtggcgctctgtattgtcttctcgctgatcgcggtgatcgccccgctacttctcttgtttggcttaaaaaacggtatcgtcagccagctgcgccacgatctgcttgacgatccacgcacgcgggaagtgcggatgaccggcaacggtaactacgatcttgcgtggctcaacgcgctcgcggcacgccctgaagttggcttctcaataccgcttacgcgatcgctgaatacccaggcagacctggtgcgcgacgggcaacattttgccgctggtgcagaggtgatcccttccgcgaaaggcgatccgctgctgcgcgagagcggagtgctgccgcacggcagcaccgtggtactgagcaacagcgctgcccgtaagctcgacgtgaaagcgggcgacacgttccggctgtttgtcagccgtaaacgcgacgggcagaaccagcgcacatcgctctccgtcagcgtcggtgccattctcgacgaggcgcgctttgcccgccctgcgctgtttgtcgacctgcctctgctggtggcgctggaagattatcgcgacggtttccaggcgccgctgctcggcgttaccgacggtgaaaacgcgcgcgagcggcataactttgcgcgcgcacggctctatgccgccacgctggatgatgttgcccccctggcgcaatggcttgagtcgcaacatatcgaagcgataacccaggccgcgcagattgaagcggtgcgcgccatcgatcgcgtgctgggggtgattttcgcggtaatcgcctggatctcggcctcgggctgcattgcgtcacttattggcgcgtttatcgccaatatcgatcgtaaacgcaaagatatggcggtgctgcgcctgctcggttttcgccgccaggcggtgacgctgttcatcatgatccaggcgctctgcctgacgggcgttgcgtttattgctggcctgttgatttatggcgcgggcagcgcgctgtttaaccaccttctgggcgctaatctccccgaaagcgcttttgtttgtcaccttgatcctggccactttgccgccgccttcctgagcgtgctggccgtggcgctgggcgttgccgcgattggcgcgctgcgggcgttaaagatcgaacctgcggagagtttacgtgaaatttaa

SEQ ID NO: 952 - DNA, 786 bp, Kosakonia cowanii
  source 1..786: mol_type = genomic DNA
atgacaacagagaatctggcgcaaatgggcgccgcccgggtggtgaagcgggttaacgccaccggaatagccgtgattgagaaagtgccggtcagcaaggttgagtacgccttctaccaccaggttgcgcccgagctaaaccgcgcggaaatccttaccccagccttgctggcagccgatgccagcacgctcgccctcacccttgaagcgattccctaccctgttagccagcaaaatgtcgcgaacgacgctatcgtgtcgatgctggcacggttacaccgctttgcgccggataaaaactggcactatcacccccatcgctggcccgatgcccagctggagctgagcctgcaactgctcgccttaccggaagaggccgccagcgtgctgcgccgctgccagcgcgagagcgacagactgtttgccgaagcgggcctgatttccggcgacagtaatgctggcaactgggggcaacgcgagaacggcgagtttgtgctgtttgactgggagcggttcagcaccggtcacccggccattgatttagccccgctgattaaaggtatgggtacgcctgaagagtatcgacacctcgcggcgcgctactgccgatttaatccgcggtcagaaaatgatctcgctcgcgatattgccttagcgaaagcgtggattgtcagcgaagtgattacgctccttcacaagcgacagaaagcggattttccgcgttttcagcactggtatcgcagctatttgcccgactggctgagggaagtggaaaaaatgaagtga

SEQ ID NO: 953 - DNA, 1542 bp, Kosakonia cowanii
  source 1..1542: mol_type = genomic DNA
gtgaaatttaacctgttactgacgctggctgcggccgggttaggcttttcctgcgcggcaaacgcaacgtgggatgagaagttctggaacccaaaacccttggctgatgatgtgatcctgccgctgccctgcgatggcgcaatggcgtttcgtaaggttgctattcctctggataagccgttagccgattacagcattacgcttggcgaagagggtaacgagtggggctatatcgaacagtcacgcccggaccatatcgccggtagcttcccgcaagagaagaaagagaaaggccgttactacctgatggccaaatatgagctgacggatttgcagtatcgcgcactctccggtgattgcgccaaacccgatatcaaaggtcgtctgccgaaggtcaatatcggctggatggacgccatgtcgattgccgataaatacaacctgtggctgcgaaaagagaagccggacgcactgccgcaggatgataagcagccgggctttttacgtctgccgacggaaaccgaatgggagtttgccgcgcgcggcgggctgtctgtctcgtcggcggagtttcgcgatcgccacttcccaatgccggaaggcctgaatggctatgtctggttcgcgggggcgcagtcagcaaataacaaacttcagcttaccggcctgcttaaaccgaacccgctgggtctgcacgatatgctcggcaacgttggcgaaatgatgtttgagccgtttcgcttaaataaacttgaccgcctgcatggcaaagcgggcggctatatcgtgcgcggcggcagctacttaacgccgcaggccgatattcgcagttcgctgcgcggggaagagccctattacaccgcgcaaggtgagaacagcagcaaggcgactggcatgcgcttagttctggtctcaaccaccctcacctcgcgggatcgcatcaaagagattgaaaaagagtggcaggcgctgggtaccgagagcaaagcggcgaagaaaccgggcgaaggcgcggactcattacagaacctgaatgccatctccgccaaagtgcaggatgagggcgtgaaaaaggagctggagtcgctgcgtaatgaactgcgagccaatagccagctgcgggatgagcaacgcgaccaggcgatccgcacctctttgcagctgggcgcctttttgtgcaccaagatgaaagatgacggcgagtttctcgatcgccttaaccagctttatagcaaaacgtgtgccaccgggagccagctggatgccaactgttcgcgtcgccaggagcagctcgatcagcataaaaaagcgctggagtttatcaccagctattacgccgacacgctggtggatatgggcacgacctataacaagagcctgatcgatccgcagatgaccgtcgtgcagcaacagatggcggcgcgcggtaaaaccaatctgaatggttatctgaatacctactggggcaaccttcagggctactggaaagatggcaaagtggcgcgcgatgcgtggctgagcgcttgtaaaaaaaataattaa

SEQ ID NO: 954 - DNA, 1953 bp, Kosakonia cowanii
  source 1..1953: mol_type = genomic DNA
atgaaaacgagagtctggctgggcggattcctgtgcttaacggccgccaccatgggcgcgcacgccgccgatcaaaaaccgctgctgcaggaggggaaacatagcctttatcagcgtgttctcacctacccgggctgccagctggcaccgaaagcgggcgaggccggtaaagagcagccggcgtttagccgcttctacgtttatcagcgcagcaagcagggccaggatgagtggctgcaggtgggaccggatagcttcggtcatgtttccggctggcttaaagccgcctgtaccgtcgactggaagatgcagctcacgctggcgtttaccaacccgtcgggtcgccacccgatgctctttttccgcgataagagcgacgtcgaatcgttgctgaataaccctaaaccggctgccgcgctcgatccgttattggccaatctgaagagcaataaacccgtgccgcaggtgctggcgaaagagccggattacatggtcgatcagcagaaaaacttctacctgctgccagtgttaggctctgacgatgtctttaccgacagcggtttccaggtgcgcgtgcttaatgtcgcctcggtcagtgaaaaagcgccggagaaagcggcaaaagcggctgacgagaagaacatgatgaagggcttttcggcgtcggtggtgtttgtaatcgactccaccatttcgatgggcccctatatcgaccgcaccaaagaggcgatcgataagatctatcagcgcattgaaaaggagcacctccaggatcaggtgaagttcggtctggtggccttccgctctaatgtcaaagccgtgccggggctggagtatgacagcaagatgtatgttgaccccaatacggtgaaagatggcaaagatttcctcgccaaagtacacgatctgaagcaagccacggtctccagccgcaaagtggatgaggatgcttatggcggtgtgatgacggcgcttgataaggtcgactggacgcagtttggcgcacgttacgtgatcctgattaccgacgccggcgcgctggagggcggagataacctctcctctacacatcttgatgccgcacaggttcgccaggaagcggcctatcgtggtgtggcgctttataccctgcatctcaaaaccccgagcggtaagaaaaaccatgctgctgccgaggcgcagtatcaggatctgacgctcaacccgttcctgcataaaccgctctactacccgatcgactccggcgatgtgaacaacttcggcaccatggtcgatagcctggcgaacgccatcactggccagatcaaaaccgcctggagcggggaagagacggcgggcagcgcgctgggcgccagcgaagagtatgccggtaagaaagccgacccgctgctgagcgatgcggacaagctgagcaaagcgatgcgccttgcctatctcggcgagaaacagggaacccaggcaccgccggtgtttaaatcctggattagcgatcgcgatttggtgaaccagaacattcccgccactgaagtgcgtgtcctgctgaccaaaagcgagttgagcgatctgagcgatgtgatgaagaagatcgtcaacgccgccaacgaagggttgatctcgccggacgatatgttcgccagcctgcgttcgctggccgcaacgatgggcaacgatccgaaccaggcgaaaagcaaaaatgccacacgcttaggtgaattgggtctgctgggtgaatacatcgaagggctgccgtacctgagtgaagtgctgagccttgatgaagagacctggaagagctgggatggccttgagcaggagcgatttattcgccgtctcaataccaagctgaactactaccagcgctataaccaggatgttgaccgctggatctcgctggcaccggacagcgacccgcgtgacaacgtctaccctgtgccgctggaaaacctgccgtaa

SEQ ID NO: 955 - DNA, 1233 bp, Kosakonia cowanii
  source 1..1233: mol_type = genomic DNA
gtgtcttccagcctgcctgaaacgcgccccaggatggggctactgctaaatatggcgctgcgcgatctgatacacgatcggaaagtggcgctctgtattgtcttctcgctgatcgcggtgatcgccccgctacttctcctgtttggcttaaagaacggtatcgtcagccagctgcgccacgatctgctcgacgatccacgcacgcgggaagtgcggatgaccggcaacggtaactacgatcttgcgtggctcaatgcgctcgcggcacgcccggaggttggcttctcaataccgcttacgcgatcgctgaatacccaggcagacctggtgcgcgacgggcaacattttgccgctggtgcagaggtgatcccttccgcgaaaggcgatccgctgctgcgcgagagtagagtgctgccgcacggcagcacggtggtactgagcaacagcgccgcccgtaagctcgacgtgaaagcgggcgacacgttccggctgtttatcagccgtaaacgcgacgggcagaaccagcgcacatcgctctccgtcagcgtcggtgccattctcgacgaggcgcgctttgcccgccctgcgctatttgtcgacctgcctctgctggtggcgctggaagattatcgcgacggtttccaggtgccgctgctcggcgttaccgacggtgaaaacgcgcgcgagcggcataactttgcgcgggcgcggctctatgccgccacgctggatgatgttgcccccctggcgcaatggcttgagtcgcagcatatcgaagcgataacccaggccgcgcagattgaagcggtgcgcgccatcgatcgcgtgctgggggtgattttcgcggtgatcgcctggatctcggcctcgggctgcattgcgtcgcttattggcgcatttatcgccaatatcgatcgtaaacgcaaagatatggcagtgctgcgcctgctcggttttcgccgccaggcggtgacgctgttcatcatgatccaggcgctctgcctgacgggcgttgcgtttattgctggcctgttgatttatggcgcgggcagcgcgctgtttaaccaccttctgggcgctaatctccccgaaagcgcttttgtttgtcaccttgatcctggccactttgccgccgccttcctgagcgtgctggccgtggcgctgggcgttgccgcgattggcgcgctgcgggcgttaaagatcgaacctgcggagagtttacgtgaaatttaa

SEQ ID NO: 956 - DNA, 786 bp, Kosakonia cowanii
  source 1..786: mol_type = genomic DNA
atgacaacagagaatctggcgcaaatgggcgccgcgcgggtggtgaagcgggttaacgccaccggaatagccgtgattgagaaagcgccggtcagcaaggttgagtacgccttctaccaccaggttgcgcccgagctaaaccgcgcggaaatccttaccccagccttgctggcagccgatgccagcacgcgcgccctcacccttgaagcgattccctaccctgttagccagcaaaatgttgcgaacgacgccatcgtgtcgatgctggcacggttacaccgctttgcgccggataaaaactggcactatcacccccatcgctggcccgacgcgcagctggagctgagcctgcaactgctcgccttaccggaagaggccgccagagtgttgcgtcgctgccagcgcgagagcgacagactgtttgccgaagcgggcctgatttctggcgacagtaatgctggcaactgggggcagcgcgagaacggcgagtttgtgctgtttgactgggagcggttcagcaccggtcacccggccattgatttagccccgctgattaaaggcatgggtacgcctgaggagtatcgacacctcgcggcgcgctactgccgatttaatccgcggtcggaaaatgatctcgctcgcgatattgccttagcgaaagcgtggattgtcagcgaagtgattacgctccttcacaagcgacagaaagcggattttccgcgttttcagcactggtatcgcagctatttgcccgactggctgagggaagtggaaaaaatgaagtga

SEQ ID NO: 957 - DNA, 1542 bp, Kosakonia cowanii
  source 1..1542: mol_type = genomic DNA
gtgaaatttaacctgttactgacgctggctgcggccgggttaggcttttcctgcgcggcaaacgcaacgtgggatgagaagttctggaacccaaaacccttggctgatgatgtgatcctgccgctgccctgcgatggcgcaatggcgtttcgtaaggttgctattcctctggataagccgttagccgattacagcattacgcttggcgaagagggtaacgagtggggctatatcgaacagtcacgcccggaccatatcgccggtagcttcccgcaagagaagaaagagaaaggccgttactacctgatggccaaatatgagctgacggatttgcagtatcgcgcactctccggtgattgcgccaaacccgatatcaaaggtcgtctgccgaaggtcaatatcggctggatggacgccatgtcgattgccgataaatacaacctgtggctgcgaaaagagaagccggacgcactgccgcaggatgataagcagccgggctttttacgtctgccgacggaaaccgaatgggagtttgccgcgcgcggcgggctgtctgtctcgtcggcggagtttcgcgatcgccacttcccgatgccggaaggcctgaatggctatgtctggttcgcgggggcgcagtcagcaaataacaaacttcagcttaccggcctgcttaaaccgaacccgctgggtctgcacgatatgctcggcaacgttggcgaaatgatgtttgagccgtttcgcttaaataaacttgaccgcctgcatggcaaagcgggcggctatatcgtgcgcggcggcagctacttaacgccgcaggccgatattcgcagttcgctgcgcggggaagagccctattacaccgcgcaaggtgagaacagcagcaaagcgaacggcatgcgcctggtactggtctcaaccaccctcacctcgcgggatcgcatcaaagagattgaaaaagagtggcaggcgctgggtaccgagagcaaagcggcgaagaaaccgggcgaaggcgcggactcattacagaacctgaatgccatctccgccaaagtgcaggatgagggcgtgaaaaaggagctggagtcgctgcgtaatgaactgcgagccaatagtcagctgcgcgatgagcagcgcgaccaggcgatccgcacctctttgcagctgggcgcctttttgtgcaccaagatgaaagatgacggcgagtttctcgatcgccttaaccagctttatagcaaaacgtgtgccgccgggagccagctggatgccaactgttcgcgtcgccaggagcagctcgatcagcataaaaaagcgctggagtttatcaccagctattacgccgacacgctggtggatatgggcacgacctataacaagagcctgatcgatccgcagatgaccgtcgtgcagcaacagatggcggcgcgcggtaaaaccaatctgaatggttatctgaatacctactggggcaaccttcagggctactggaaagatggcaaagtggcgcgcgatgcgtggctgagcgcttgtaaaaaaaataattaa

SEQ ID NO: 958 - DNA, 1953 bp, Kosakonia cowanii
  source 1..1953: mol_type = genomic DNA
atgaaaacgagagtctggctgggcggattcctgtgcttaacggccgccaccatgggcgcgcacgccgccgatcaaaaaccgctgctgcaggaggggaaacatagcctttatcagcgtgttctcacctacccgggctgccagctggcaccgaaagcgggcgaggccggtaaagagcagccggcgtttagccgcttctacgtttatcagcgtagcaagcagggccaggatgagtggttgcaggtgggaccggatagcttcggtcatgtttccggctggcttaaagccgcctgtaccgtcgactggaagatgcagctcacgctggcctttaccaacccggcgggtcgccacccgatgctctttttccgcgataagagcgacgtcgaatcgttgctgaataaccctaaaccggccgccgcgctcgatccgttattggccaatctgaagagcaataaacccgtgccgcaggtgctggcgaaagagccggattacatggtcgatcagcagaaaaacttctacctgctgccagtgttaggctctgacgatgtctttaccgacagcggtttccaggtgcgcgtgcttaatgttgcctcggtcagtgaaaaagcgccggagaaagcggcaaaagcggctgacgagaagaacatgatgaagggcttttcggcgtcggtggtgtttgtaatcgactccaccatttcgatgggcccctatatcgaccgcaccaaagaggcgatcgataagatctatcagcgcattgaaaaggagcacctccaggatcaggtgaagttcgggctggtggccttccgctctaatgtcaaagccgtgccggggctggagtatgacagcaagatgtatgtcgaccccaatacggtgaaagatggcaaagatttcctcgccaaagtacacgatctcaagcaagccacggtctccagcagcaaagtggatgaggatgcttatggcggtgtgatgacggcgcttgataaggtcgactggacgcagtttggcgcacgttacgtgatcctgattaccgacgccggcgcgctggagggcggagataacctctcctctacacatcttgatgccgcacaggttcgccaggaagcggcctatcgtggtgtggcgctttataccctgcatctcaaaaccccgagcggtaagaaaaaccatgctgctgccgaggcgcagtatcaggatctgacgctcaacccgttcctgcataaaccgctctactacccgatcgactccggcgatgtgaacaacttcggcaccatggtcgatagcctggctaacgccatcaccggccagatcaaaaccgcctggagcggggaagagacggcgggcagcgcgctgggcgccagcgaagagtatgccggtaagaaagccgacccgctgctgagcgatgcggacaagctgagcaaagcgatgcgccttgcctatctcggtgaaaaacaggggacccaggcaccgccggtgtttaaatcctggatcagcgatcgcgatttggtgaaccagaacattcccgccactgaagtgcgtgtcctgctgaccaaaagcgagttgagcgatctgagcgatgtgatgaagaagatcgtcaacgccgccaacgaagggttgatctcgccggacgatatgttcgccagcctgcgttcgctggccgcaacgatgggcaacgatccgaaccaggcgaaaagcaaaaatgccacacgcttaggtgaattgggtctgctgggtgaatacatcgaagggctgccgtacctgagtgaagtgctgagccttgatgaagagacctggaagagctgggatggccttgagcaggagcgatttattcgccgtctcaataccaagctgaactactaccaacgctataaccaggatgttgaccgctggatctcgctggcaccggacagcgatccgcgtgacaacgtctaccctgtgccgctggaaaacctgccgtaa

SEQ ID NO: 959 - DNA, 786 bp, Kosakonia cowanii
  source 1..786: mol_type = genomic DNA
atgacaacagagaatctggcgcaaatgggtgccgcccgggtggtgaagcgggttaacgccgccgggatagccgtgattgagaaagtgccggtcagtaaggttgagtacgccttctaccaccaggttgcgcccgagctaaaccgcgcggaaatttttactccagccttgctggcagccgatgccagcacatgcgccctcacccttgaagcgattccctaccctgttagccagcaaaatgtcgcgaacgacgccattgtgtcgatgctggcgcgcttacaccgctttgcgccggataaaaactggcactatcacccccatcgctggcccgacgcgcagctggagctgagcctgcacctgctcgctttgccggaagcagccaccagagcgctgcgccgctgccagcgcgacagcgacaggctgtttgccgaagcgggcctgatttccggcgacagcaacgccggcaactgggggcagcgcgaaaacggcgagtttgtgctgtttgactgggagcggttcagcaccggtaacccggccattgatttagccccactgattaaaggcatgggcacgcctgaagagtatcgacacctcgcggcgcgctactgccgatttaatccgcggtcagaaaacgatctcacacgcgatattgccttagcgaaagcgtggattgtcagcgaagtgattacgctccttcacaagcgacagaaagcggattttccgcgttttcagcactggtatcgcagctatttgcccgactggctgagggaagtggaaaaaatgatttga

SEQ ID NO: 960 - DNA, 1542 bp, Kosakonia cowanii
  source 1..1542: mol_type = genomic DNA
gtgaaatttaacctgttactgacgctggctgcggccgggttaggcttttcctgcgcggcaaacgcaacgtgggatgagaagttctggaacccaaaacccttggccgatgatgtgatcctgccgctgccctgcgatggcgcaatggcgtttcgtaaggttgctattcctctggataagccgttagccgattacagcattacgcttggcgaagagggcaacgagtggggctatatcgaacagtcacgcccggaccatatcgccggtagcttcccgcaagagaaaaaagagaaaggccgttactacctgatggccaaatatgagctgacggatttgcagtatcgcgcactttccggtgattgcgccaaacccgatatcaaaggtcgtctgccgaaggtcaatatcggctggatggacgccatgtcgattgccgataaatacaacctgtggctgcgaaaagagaagccggacgcactgccgcaggatgataagcagccaggctttttacgtctgccgacggaaaccgaatgggagtttgccgcgcgcggcgggctatctgtctcttcggcggagtttcgcgatcgccacttcccgatgccggaaggcctgaatggctatgtctggttcgcgggggcgcagtcagcgaataacaaactccagcttaccggcctgcttaaaccgaacccgctgggtctgcacgatatgctcggcaacgctggcgaaatgatgtttgagccgtttcgcttaaataaacttgaccgcctgcatggcaaagcgggcggctatatcgtgcgcggcggcagttacttaacgccgcagaccgatatccgcagctcgctgcgcggggaagagccctattacaccgcgcaaggtgagaacagcagcaaagcgaacggcatgcgcctggtactggtctcaaccaccctcacctcgcgggatcgcattaaagagattgaaaaagagtggcaggcgctgggtaccgagagcaaagcggcgaagaaaccgggcgaaggcgcggactcattacagaacctgaatgccatctccgccaaagtgcaggatgaaggcgtgaaaaaggagctggagtcgctgcgtaatgaactgcgagccaatagccagctgcgcgatgagcagcgcgaccaggcgatccgcacctctttgcaactgggcgcctttttgtgcaccaagatgaaagatgacggcgagtttctcgatcgccttaatcagctttatagcaaaacgtgtgccgccgggagccagctcgatgccaactgttcgcgtcgccaggagcagctcgatcagcataaaaaagcgctggagtttatcaccagctattacgccgacacgctggtggatatgggcacgacctataacaagagcctgatcgatccgcagatgaccgtcgtgcagcagcagatggcggcgcgcggtaaaaccaatctaaacggttacctgaatacctactggggcaatcttcagggctactggaaagatggcaaagtggcgcgcgatgcgtggctgagcgcttgtaaaaaaaataattaa

SEQ ID NO: 961 - DNA, 1953 bp, Kosakonia cowanii
  source 1..1953: mol_type = genomic DNA
atgaaaacgagagtctggctgggcggatttctgtgcttaacggccgccactatgggcgcgcacgccgccgatcaaaaaccgctgctgcaggaggggaaacatagcctttatcagcgtgttctcacctacccgggctgccagctggcaccgaaagcgggcgaggccggtaaagagcagccggcgtttagccgcttctacgtttatcagcgcagcaagcagggccaggatgagtggctgcaggtcgggccggatagcttcggtcatgtttccggctggcttaaagccgcctgtaccgtcgactggaagatgcagctcacgctggcgtttaccaacccggcgggtcgccacccgatgctctttttccgcgataagagcgacgtcgaatcgttgctgaataacccaaaaccggctgccgcactcgatccattattggccaatctgaagagcaataaacccgtgccgcaggtgctggcgaaagagccggattacatggtcgatcagcagaaaaacttctatctgctgccagtgttaggctctgacgatgtctttaccgacagcggtttccaggtgcgcgtgcttaatgtcgcctcggtcagtgaaaaagcgccggagaaagcggcaaaagcggctgacgagaagaacatgatgaagggcttttcggcgtcggtagtgtttgtaatcgactccaccatttcgatgggcccctatatcgaccgcaccaaagaggcgatcgataagatctatcagcgcattgaaaaggagcatctccaggatcaggtgaagtttggtctggtggccttccgctccaatgtcaaagccgtgccggggctggagtatgacagcaagatgtacgtcgaccccaacacggtgaaagatggcaaagatttcctcgccaaagtacacgatctgaagcaagccacggtctccagtagcaaagtggaagaggatgcttatggcggcgtgatgacggcgcttgataaggtcgactggacgcagtttggcgcgcgttacgtgatcctgattaccgacgccggcgcgctggagggcggggataacctctcctccacgcatcttgatgccgcgcaggttcgccaggaagcggcctaccgtggtgtggcgctctataccctgcatctcaaaaccccgagcggtaagaaaaaccatgccgccgccgaggcgcagtatcaggatctgacgctcaacccgttcctgcataaaccgctctactacccgatcgactccggcgatgtgaacaacttcggcgctatggtcgatagcctggcgaatgccatcactggccagattaaaaccgcctggagcggcgaagagacggcgggcagcgcgctgggtgccagcgaagagtatgccggtaagaaagccgacccgctgctgagcgatgcggacaagctgagcaaagcgatgcgccttgcctatctcggcgaaaaacaggggacccaggcaccgccggtgtttaaatcctggatcagcgaccgcgatttagtgaaccagaacattcccgccaccgaagtgcgtgtcctgctgaccaaaagcgagctgagcgatctgagtgatgtgatgaagaagatcgtcaacgccgccaacgaagggttgatctcgccggacgatatgttcgccagcctgcgttcgctggccgcaacgatgggcaacgatccgaaccaggcgaaaagcaaaaacgctacgcgcttaggtgaattggggctgctgggtgaatacatcgaagggctgccgtacctgagtgaagtactgagtcttgatgaagagacctggaagagctgggatggccttgagcaggagcggtttattcgccgtctcaataccaagctgaactactaccagcgctataaccaggatgttgaccgctggatctcgctggcaccggacagcgatccgcgtgacaacgtctaccctgtgccgctggaaaacctgccgtaa

SEQ ID NO: 962 - DNA, 1233 bp, Kosakonia cowanii
  source 1..1233: mol_type = genomic DNA
gtgtcttccagcctgcctgaaactcgccccaggatggggctactactgaatatggcgctgcgcgatctgatccacgatcgaaaagtggcgctctgtattgtcttctcgctgatcgcggtgatcgccccgctacttctcttgtttggcttaaaaaacggtatcgtcagccagctgcgccacgatctgcttgacgatccacgcacgcgggaagtgcggatgaccggcaacggtaactacgatcttgcgtggctcaacgcgctcgcggcacgcccggaagttggcttctcaataccgcttacgcgatcgctgaatacccaggcagacctggtgcgcgacgggcaacattttgccgctggtgcagaggtgatcccttccgcgaaaggcgatccgctgctgcgtgagagcggagtgctgccgcacggcagcaccgtggtactgagcaacagcgctgcccgtaagctcgacgtgaaagcgggcgacacgttccggctgtttgtcagccgtaaacgcgacgggcagaaccagcgcacatcgctctccgtcagcgtcggtgccattctcgacgaggcgcgctttgcccgccctgcgctgtttgtcgacctgcctctgctggtggcgctggaagattatcgcgacggtttccaggcgccgctgctcggcgttactgacggtgaaaacgcgcgcgagcggcataactttgcgcgcgcacggctctatgccgccacgctggatgatgttgcccccctggcgcaatggcttgagtcgcaacatatcgaagcgataacccaggccgcgcagattgaagcggtgcgcgccatcgatcgcgtgctgggggtgattttcgcggtaatcgcctggatctcggcctcaggctgcattgcgtcgcttattggcgcgtttatcgccaatatcgatcgtaaacgcaaagatatggcagtgctgcgcctgctcggttttcgccgccaggcggtgacgctgtttatcatgatccaggcgctctgcctgacgggcgttgcgtttattgctggcctgttgatttatggcgcgggcagcgcgctgtttaaccaccttctgggcgctaatctccccgaaagcgcttttgtttgtcaccttgatcctggccactttgccgccgccttcctgagcgtgctggccgtggcgctgggcgttgccgcgattggcgcgctgcgggcgttaaagatcgaacctgcggagagtttacgtgaaatttaa

SEQ ID NO: 963 - DNA, 786 bp, Kosakonia cowanii
  source 1..786: mol_type = genomic DNA
atgacaacagagaatctggcgcagatgggcgccgcgcgggtagtgaagcgggttaacgccgatggaataaccgtgattgagaaagcgccggtcagcgacgtcgagtacgccttctatcatcaggtcgcgcctgcgctcaaccgcgcggagatcttcacgcctgccttgctggcagccgatgtggatgcgcgcgccctcacccttgaagcaattccctaccctgttagccagcaaaatgtcgcaagcgacgctatcgtgtcgatgctggcgcgcttgcaccgctttgcgccggataaaaagtggtactatcacacccaccgttggcccaacgcgcagctggagctaagcctgcaactgctcgccttaccgcaagaggccgctgacgtgctgcgccgctgccagcgcgagagcgacaaactgtttgccgaagcgagcctgatttccggcgacagtaacgctggcaactgggggcagcgcgagaacggcgagtatgtgctgtttgactgggagcggttcagcaccggccatccggccattgatttagccccgctgatcaaaggcatgggctcccctgacgagtatcaacacctcgcagcgcgctactgccgctttaatccgctgccagacaacgatctcgcgcgccatattgccttagcgaaagcgtggatcgtcagtgaagtgattacgctccttcacaagcggcaaaaagccgatttcccacgttttcagcactggtatcgcggccatttgcccgactggcttaagcagatcgaaaccgttatctga

SEQ ID NO: 964 - DNA, 786 bp, Kosakonia cowanii
  source 1..786: mol_type = genomic DNA
atgacaacagagaatctggcgcaaatgggcgccgcgcgggtggtgaagcgggttaacgccaccggaatagccgtgattgagaaagcgccggtcagcaaggttgagtacgccttctaccaccaggttgcgcccgagctaaaccgcgcggaaatccttaccccagccttgctggcagccgatgccagcacgcgcgccctcacccttgaagcgattccctaccctgttagccagcaaaatgtcgcgaacgacgctatcgtgtcgatgctggcacggttacaccgctttgcgccggataaaaactggcactaccacccccatcgctggtccgacgcgcagctggcgctgagcctgcaactgctcgccttaccggaagaggccgccagagtgctgcgtcgctgccagcgcgagagcgacagactttttgccgaagcgggcctgatttctggcgacagtaatgctggcaactgggggcaacgcgagaacggcgagtttgtgctgtttgactgggagcggttcagcaccggtcacccggccattgatttagccccgctgattaaaggcatgggcacgcctgaggagtatcgacacctcgcggcgcgctactgccgatttaatccgcggtcagaaaacgatctcgctcgcgatattgccttagcgaaagcgtggattgtcagcgaagtgattacgctccttcacaagcgacagaaagcggattttccgcgttttcagcactggtatcgcagctatttgcccgactggcttaagcagacaggaacacttatctga

SEQ ID NO: 965 - DNA, 786 bp, Kosakonia cowanii
  source 1..786: mol_type = genomic DNA
atgacagcagagaatctggcgcaaatgggcgccgcgcgggtggtgaagcggattaacgccgccggaatagtcgtgattgagaaagcaccggtcagcgaggtcgagtacgccttctaccaccaggttgcgcccgagctaaaccgcgcggaaatttttactccagccttgctggcagccgatgccagcacgcgcgccctcatccttgaagcgattccctcccctgttagccagcaaaatgttacgtgcgacgccatcgtgtcgatgctggcgcgcttacaccgctttgcgccggatagaaactggcactatcacccccatcgctggcccgacgcgcagctggagttgagcctgcacctgctcgccttgccggaagcagccgccagagcgctgcgtcgctgccagcgcgacagcgataaattgtttgccgaagcgggcctgatttccggcgacagtaacgccggcaactgggggcagcgcgagaacggtgagtttgtgctgtttgactgggagcggttcagcaccggtcacccggccattgatttagctccgctgattaaaggtatgggcacgcctgaagagtatcgacgcctcgcggcgcgctactgccgctttaatccgcggtcagaaaacgatctcgctcgcgatattgccttagcgaaagcgtggattgtcagcgaagtgattacgctccttcaccagcgacagaaagcggattttccgcgttttcagcactggtatcgctgttatttgcccgactggcttaagcagatcgaaaccgttatctga

SEQ ID NO: 966 - DNA, 786 bp, Kosakonia cowanii
  source 1..786: mol_type = genomic DNA
atgacaacagagaatctggcgcaaatgggcgccgcccgggtggtgaagcgggttaacgccaccggaatagccgtgattgagaaagcgccggtcagcgaggtcgagtacgccttctaccaccaggttgcgcccgagctaaaccgcgcggaaatccttaccccagccttgctggcagccgatgccagtacgcgcgccctcacccttgaagcgattccctaccctgttagccagcaaaatgtcgcgaacgacgctatcgtgtcgatgctggcacggttacaccgctttgcgccggataaaaactggcactatcacccccatcgctggcccgatgcccagctggcgctgagcctgcaactgctcgccttaccggaagaggccgccagagtgctgcgccgctgccagcgcgagagcgacagactgtttgccgaagcgggcctgatttccggcgacagtaatgctggcaactgggggcagcgcgagaacggcgagtttgtgctgtttgactgggagcggttcagcaccggtcacccggccattgatttagccccgctgattaaaggcatgggcacgcctgaggagtatcgacacctcgcggcgcgctactgccgatttaatccgcggtcggaaaatgatctcgctcgcgatattgccttagcgaaagcgtggattgtcagcgaagtgattacgctccttcacaagcgacagaaagcggattttccgcgttttcagcactggtatcgcagctatttgccagactggctgagggaagtggaaaaaatgaagtga

SEQ ID NO: 967 - DNA, 1542 bp, Kosakonia cowanii
  source 1..1542: mol_type = genomic DNA
gtgaaatttaacctgttactgacgctggctgcggccgggttaggcttttcctgcgcggcaaacgcaacgtgggatgagaagttctggaacccaaaacccttggctgatgatgtgatcctgccgctgccctgcgatggcgcaatggcgtttcgtaaggttgctattcctctggataagccgttagccgattacagcattacgcttggcgaagagggtaacgagtggggctatatcgaacagtcacgcccggaccatatcgccggtagcttcccgcaagagaagaaagagaaaggccgttactacctgatggccaaatatgagctgacggatttgcagtatcgcgcactctccggtgattgcgccaaacccgatatcaaaggtcgtctgccgaaggtcaatatcggctggatggacgccatgtcgattgccgataaatacaacctgtggctgcgaaaagagaagccggacgcactgccgcaggatgataagcagccgggctttttacgtctgccgacggaaaccgaatgggagtttgccgcgcgcggcgggctgtctgtctcgtcggcggagtttcgcgatcgccacttcccaatgccggaaggcctgaatggctatgtctggttcgcgggggcgcagtcagcaaataacaaacttcagcttaccggcctgcttaaaccgaacccgctgggtctgcacgatatgctcggcaacgttggcgaaatgatgtttgagccgtttcgcttaaataaacttgaccgcctgcatggcaaagcgggcggctatatcgtgcgcggcggcagctacttaacgccgcaggccgatattcgcagttcgctgcgcggggaagagccctattacaccgcgcaaggtgagaacagcagcaaagcgaacggcatgcgcctggtactggtctcaaccaccctcacctcgcgggatcgcatcaaagagattgaaaaagagtggcaggcgctgggtaccgagagcaaagcggcgaagaaaccgggcgaaggcgcggactcattacagaacctgaatgccatctccgccaaagtgcaggatgagggcgtgaaaaaggagctggagtcgctgcgtaatgaactgcgagccaatagtcagctgcgcgatgagcagcgcgaccaggcgatccgcacctctttgcagttgggcgcctttttgtgcaccaagatgaaagatgacggcgagtttctcgatcgccttaaccagctttatagcaaaacgtgtgccgccgggagccagctggatgccaactgttcgcgtcgccaggagcagctcgatcagcataaaaaagcgctggagtttatcaccagctattacgccgacacgctggtggatatgggcacgacctataacaagagcctgatcgatccgcagatgaccgtcgtgcagcaacagatggcggcgcgcggtaaaaccaatctgaatggttacctgaatacctactggggcaaccttcagggctactggaaagatggcaaagtggcgcgcgatgcgtggctgagcgcttgtaaaaaaaataattaa

SEQ ID NO: 968 - DNA, 1953 bp, Kosakonia cowanii
  source 1..1953: mol_type = genomic DNA
atgaaaacgagagtctggctgggcggattcctgtgcttaacggccaccaccatgggcgcgcacgccgccgatcaaaaaccgctgctgcaagaggggaaacatagcctttatcagcgtgttctcacctacccgggctgccagctggcaccgaaagcgggcgaggccggtaaagagcagccggcgtttagccgcttctacgtttatcagcgtagcaagcagggccaggatgagtggttgcaggtggggccggatagcttcggtcatgtttccggctggcttaaagccgcctgtaccgtcgactggaagatgcagctcacgctggcctttaccaacccggcgggtcgccacccgatgctctttttccgcgataagagcgacgtcgaatcgttgctgaataaccctaaaccggccgccgcgttcgatccgttattggccaatctgaagagcaataaacccgtgccgcaggtgctggcgaaagagccggattacatggtcgatcagcagaaaaacttctacctgctgccagtgttaggctctgacgatgtctttaccgacagcggtttccaggtgcgcgtgcttaatgtcgcctcggtcagtgaaaaagcgccggagaaagcggcaaaagcggctgacgagaagaacatgatgaagggcttttcggcgtcggtggtgtttgtaatcgactccaccatttcgatgggcccctatatcgaccgcactaaagaggcgatcgataagatctatcagcgcattgaaaaggagcacctccaggatcaggtgaagttcgggctggtggccttccgctctaatgtcaaagccgtgccggggctggagtatgacagcaagatgtatgttgaccccaatacggtgaaagatggcaaagatttcctcgccaaagtacacgatctgaagcaagccacggtctccagcagcaaagtggatgaggatgcttatggcggtgtgatgacggcgcttgataaggtcgactggacgcagtttggcgcacgttacgtgatcctgattaccgacgccggcgcgctggagggcggagataatctctcctctacacatcttgatgccgcacaggttcgccaggaagcggcctatcgtggtgtggcgctttataccctgcatctcaaaaccccgagcggtaagaaaaaccatgctgctgccgaggcgcagtatcaggatctgacgctcaacccgttcctgcataaaccgctctactacccgatcgactccggcgatgtgaacaacttcggcaccatggtcgatagcctggctaacgccatcactggccagatcaaaaccgcctggagcggcgaagagacggcgggcagcgcgctgggcgccagcgaagagtatgccggtaagaaagccgacccgctgctgagcgatgcggacaagctgagcaaagcgatgcgccttgcctatctcggcgagaaacagggaacccaggcaccgccggtgtttaaatcctggattagcgatcgcgatttggtgaaccagaacattcccgccactgaagtgcgtgtcctgctgaccaaaagcgagttgagcgatctgagcgatgtgatgaagaagatcgtcaacgccgccaacgaagggttgatctcgccggacgatatgttcgccagcctgcgttcgctggccgcaacgatgggcaacgatccgaaccaggcgaaaagcaaaaatgccacacgcttaggtgaattgggtctgctgggtgaatacatcgaagggctgccgtacctgagtgaagtgctgagccttgatgaagagacctggaagagctgggatggccttgagcaggagcgatttattcgccgtctcaataccaagctgaactactaccagcgctataaccaggatgttgaccgctggatctcgctggcaccggacagcgatccgcgtgacaacgtctaccctgtaccgctggaaaacctgccgtaa

SEQ ID NO: 969 - DNA, 1233 bp, Kosakonia cowanii
  source 1..1233: mol_type = genomic DNA
gtgtcttccagcctgcctgaaacgcgccccaggatggggctactgctaaatatggcgctgcgcgatctgatacacgatcggaaagtggcgctctgtattgtcttctcgctgatcgcggtgatcgccccgctacttctcctgtttggcttaaagaacggtatcgtcagccagctgcgccacgatctgctcgacgatccacgcacgcgggaagtgcggatgaccggcaacggtaactacgatcttgcgtggctcaatgcgctcgcggcacgcccggaggttggcttctcaataccgcttacgcgatcgctgaatacccaggcagacctggtgcgcgacgggcaacattttgccgctggtgcagaggtgatcccttccgcgaaaggcgatccgctgctgcgcgagagcggagtgctgccgcacggcagcacggtggtactgagcaacagcgccgcccgtaagctcgacgtgaaagcgggcgacacgttccggctgtttatcagccgtaaacgcgacgggcagaaccagcgcacatcgctctccgtcagcgtcggtgccattctcgacgaggcgcgctttgcccgccctgcgctatttgtcgacctgcctctgctggtggcgctggaagattatcgcgacggtttccaggtgcagctgctcggcgttaccgacggtgaaaacgcgcgcgagcggcataacttcgcgcgggcgcggctctatgccgccacgctggatgatgttgcccccctggcgcaatggcttgagtcgcagcatatcgaagcgataacccaggccgcgcagattgaagcggtgcgcgccatcgatcgcgtgctgggggtgattttcgcggtgatcgcctggatctcggcctcgggctgcattgcgtcgcttattggcgcgtttatcgccaatatcgatcgtaaacgcaaagatatggcagtgctgcgcctgctcggttttcgccgccaggcggtgacgctgttcatcatgatccaggcgctctgcctgacgggcgttgcgtttattgctggcctgttgatttatggcgcgggcagcgcgctgtttaaccaccttctgggcgctaatctccccgaaagcgcttttgtttgtcaccttgatcctggtcactttgccgccgccttcctgagcgtgctggccgtggcgctgggcgttgccgcgattggcgcgctgcgggcgttaaagatcgaacctgcggagagtttacgtgaaatttaa

SEQ ID NO: 970 - DNA, 786 bp, Kosakonia cowanii
  source 1..786: mol_type = genomic DNA
atgacaacagagaatctggcgcaaatgggcgccgcgcgggtggtgaagcgggttaacgccaccggaatagtcgtgattgagaaagcgccggtcagcaaggttgagtacgccttctaccaccaggttgcgcccgagctaaaccgcgcggaaatccttaccccagccttgctggcagccgatgccagcacgcgcgccctcacccttgaagcgattccctaccctgttagccagcaaaatgtcgcgaacgacgctatcgtgtcgatgctggcacggttacaccgctttgcgccggataagaactggaactatcacccccatcgctggcccgacgcgcagctggcgctgagcctgcaactgctcgccttgccggaagaggccgccagcgtgctgcgccgctgccagcgcgagagcgacagactgtttgccgaagcgggcctgatttccggcgacagtaatgctggcaactgggggcagcgcgagaacggcgagtttgtgctgtttgactgggagcggttcagcaccggtcacccggccattgatttagccccgctgattaaaggcatgggcacgcctgaggagtatcgacacctcgcggcgcgctactgccgatttaatccgtggtcagaaaacgatctcgctcgcgatattgccttagcgaaagcgtggattgtcagcgaagtgattacgctgcttcacaagcgacagaaagcggattttcagcgttttcagcactggtatcgcagctatttgcccgactggctgagggaagtggaaaaaatgaagtga

SEQ ID NO: 971 - DNA, 1542 bp, Kosakonia cowanii
  source 1..1542: mol_type = genomic DNA
gtgaaatttaacctgttactgacgctggctgcggccgggttaggcttttcctgcgcggcaaacgcaacgtgggatgagaagttctggaatccaaaacccttggctgatgatgtgatcctgccgctgccctgcgatggcgcaatggcgtttcgtaaggttgctattcctctggataagccgttagccgattacagcattacgcttggcgaagagggtaacgagtggggctatatcgaacagtcacgcccggaccatatcgccggtagcttcccgcaagagaagaaagagaaaggccgttactacctgatggccaaatatgagctgacggatttgcagtatcgcgcactctccggtgattgcgccaaacccgatatcaaaggtcgtctgccgaaggtcaatatcggctggatggacgccatgtcgattgccgataaatacaacctgtggctgcgaaaagagaagccggacgcactgccgcaggatgataagcagccgggctttttacgtctgccgacggaaaccgaatgggagtttgccgcgcgcggcgggctgtctgtctcgtcggcggagtttcgcgatcgccacttcccgatgccggaaggcctgaatggctatgtctggttcgcgggggcgcagtcagcaaataacaaacttcagcttaccggcctgcttaaaccgaacccgctgggtctgcacgatatgctcggcaacgttggcgaaatgatgtttgagccgtttcgcttaaataaacttgaccgcctgcatggcaaagcgggcggctatatcgtgcgcggcggcagctacttaacgccgcaggccgatattcgcagttcgctgcgcggggaagagccctattacaccgcgcaaggtgagaacagcagcaaagcgaacggcatgcgcctggtactggtctcaaccaccctcacctcgcgggatcgcatcaaagagattgaaaaagagtggcaggcgctgggtaccgagagcaaagcggcgaagaaaccgggcgaaggcgcggactcattacagaacctgaatgccatctccgccaaagtgcaggatgaaggcgtgaaaaaggagctggagtcgctgcgtaatgaactgcgagccaatagtcagctgcgcgatgagcagcgcgaccaggcgatccgcacctctttgcagttgggcgcctttttgtgcaccaagatgaaagatgacggcgagtttctcgatcgccttaaccagctttatagcaaaacgtgtgccgccgggagccagctggatgccaactgttcgcgtcgccaggagcagctcgatcagcataaaaaagcgctggagtttatcaccagctattacgccgacacgctggtggatatgggcacgacctataacaagagcctgatcgatccgcagatgaccgtcgtgcagcaacagatggcggcgcgcggtaaaaccaatctgaatggttatctgaatacctactggggcaaccttcagggctactggaaagatggcaaagtggcgcgcgatgcgtggctgagcgcttgtaaaaaaaataattaa

SEQ ID NO: 972 - DNA, 1953 bp, Kosakonia cowanii
  source 1..1953: mol_type = genomic DNA
atgaaaacgagagtctggctgggcggattcctgtgcttaacggccgccaccatgggcgcgcatgccgccgatcaaaaaccgctgctgcaggaggggaaacatagcctttatcagcgtgttctcacctacccgggctgccagctggcaccgaaagcgggcgaggccggtaaagagcagccggcgtttagccgcttctacgtttatcagcgcagcaagcagggccaggatgagtggttgcaggtggggccggatagcttcggtcatgtttccggctggcttaaagccgcctgtaccgtcgactggaagatgcagctcacgctggcctttaccaacccggcgggtcgccacccgatgctctttttccgcgataagagcgacgtcgaatcgttgctgaatacccctaaaccggctgccgcgctcgatccgttattggccaatctgaagagcaataaacccgtgccgcaggtgctggcgaaagagccggattacatggtcgatcagcagaaaaacttctacctgctgccagtgttaggctctgacgatgtctttaccgacagcggtttccaggtgcgcgtgcttaatgtcgcctcggtcagtgaaaaagcgccggagaaagcggcaaaagcggctgacgagaagaacatgatgaagggcttttcggcgtcggtggtgtttgttatcgactccaccatttcgatgggtccctatatcgaccgcactaaagaggcgatcgataagatctatcagcgcattgaaaaggagcacctccaggatcaggtgaagttcggtctggtggccttccgctctaatgtcaaagccgtgccggggctggagtatgacagcaagatgtatgttgaccccaatacggtgaaagatggcaaagatttcctcgccaaagtacacgatctcaagcaagccacggtctccagcagcaaagtggatgaggatgcttatggcggtgtgatgacggcgcttgataaggtcgactggacgcagtttggcgcacgttacgtgatcctgattaccgacgccggcgcgctggagggcggagataacctctcctctacacatcttgatgccgcacaggttcgccaggaagcggcctatcgtggtgtggcgctttataccctgcatctcaaaaccccgagcggtaagaaaaaccatgctgctgccgaggcgcagtatcaggatctgacgctcaacccgttcctgcataaaccgctctactacccgatcgactccggcgatgtgaacaacttcggcaccatggtcgatagcctggcgaacgccatcactggccagatcaaaaccgcctggagcggggaagagacggcgggcagcgcgctgggcgccagcgaagagtatgccggtaagaaagccgacccgctgctgagcgatgcggacaagctgagcaaagcgatgcgccttgcctatctcggtgaaaaacaggggacccaggcaccgccggtgtttaaatcctggatcagcgatcgcgatttggtgaaccagaacattcccgccactgaagtgcgtgtcctgctgaccaaaagcgagctgagcgatctgagcgatgtgatgaagaagatcgtcaacgccgccaacgaagggttgatctcgccggacgatatgttcgccagcctgcgttcgctggccgcaacgatgggcaacgatccgaaccaggcgaaaagcaaaaatgccacacgcttaggtgaattgggtctgctgggtgaatacatcgaagggctgccgtacctgagtgaagtgctgagccttgatgaagagacctggaagagctgggatggccttgagcaggagcgatttattcgccgtctcaataccaagctgaactactaccagcgctataaccaggatgttgaccgctggatctcgctggcaccggacagcgatccgcgtgacaacgtctaccctgtgccgctggaaaacctgccgtaa

SEQ ID NO: 973 - DNA, 1233 bp, Kosakonia cowanii
  source 1..1233: mol_type = genomic DNA
gtgtcttccagcctgcctgaaacgcgccccggaatggggctactgctgaatatggcgctgcgcgatctgatccacgatcggaaagtggcgctctgtattgtcttctcgctgatcgcggtgatcgccccgctactccttctgtttggcttaaagaacggtatcgtcagccagctgcgccacgatctgctcgacgatccgcgcacgcgggaagtgcgcatgaccggcaacggtaactacgatcttgcatggctcaacgcgcttgctgcgcgcccggaggttggcttctcaataccgcttacgcgatcgctgaatacccaggcagacctggtgcgcgacgggcaacattttgccgctggtgcagaggtgatcccttccgcgaaaggcgatccgctgctgcgcgagagtagagtgccgccgcacggcagcacggtggtactgagcaacagcgccgcccgtaagctcgacgtgaaagcgggcgacacgttccggctgtttgtcagccgtaaacgcgacgggcagaaccagcgcacatcgctctccgtcagcgttggtgccattctcgacgaggcgcgctttgcccgccctgcgctatttgtcgacctgcctctgctggtggcgctggaagattatcgcgacggtttccaggtgccgctgctcggcgttaccgacggtgaaaacgcgcgcgagcggcataactttgcgcgggcgcggctctatgccgccacgctggatgatgttgcccccctggcgcaatggcttgagtcgcagcatatcgaagcgataacccaggccgcgcagattgaagcggtgcgcgccatcgatcgcgtgctgggggtgattttcgcggtgatcgcctggatctcggcctcgggctgcattgcgtcgcttattggcgcgtttatcgccaatatcgatcgtaaacgcaaagatatggcagtgctgcgcctgctcggttttcgccgccaggcggtgacgctgttcatcatgatccaggcgctctgcctgacgggcgttgcgtttattgctggcctgttgatttatggcgcgggcagcgcgctgtttaaccaccttctgggcgctaatctccccgaaagcgcttttgtttgtcaccttgatcctggccactttgccgccgccttcctgagcgtgctggccgtggcgctgggcgttgccgcgattggcgcgctgcgggcgttaaagatcgaacctgcggagagtttacgtgaaatttaa

SEQ ID NO: 974 - DNA, 786 bp, Kosakonia cowanii
  source 1..786: mol_type = genomic DNA
atgacaacagagaatctggcgcaaatgggcgccgcccgggtggtgaagcgggttaacgccaccggaatagccgtgattgagaaagcgccggtcagcaaggttgagtacgccttctaccaccaggttgcgcccgagctaaaccgcgcggaaatccttaccccagccttgctggcagccgatgccagcacgcgcgccctcacccttgaagcgattccctaccctgttagccagcaaaatgttgcgaacgacgccatcgtgtcgatgctggcacggttacaccgctttgcgccggataaaaactggcactatcacccccatcgctggcccgacgcgcagctggagctgagcctgcaactgctcgccttaccggaagaggccgccagagtgctgcgtcgctgccagcgcgagagcgacagactctttgccgaagcgggcctgatttccggcgacagtaatgctggcaactgggggcagcgcgagaacggcgagtttgtgctgtttgactgggagcggttcagcaccggtcacccggccattgatttagccccgctgattaaaggcatgggcacgcctgaggagtatcgacacctcgcggcgcgctactgccgatttaatccgcggtcagaaaacgatctcgctcgcgatattgccttagcgaaagcgtggattgtcagcgaagtgactacgctccttcacaagcgacagaaagcggattttccgcgttttcagcactggtatcgcagctatttgcccgactggctgagggaaatggaaaaaatgatgtga

SEQ ID NO: 975 - DNA, 1542 bp, Kosakonia cowanii
  source 1..1542: mol_type = genomic DNA
gtgaaatttaacctgttactgacgctggctgcggccgggttaggcttttcctgcgcggcaaacgcaacgtgggatgagaagttctggaacccaaaacccttggctgatgatgtgatcctgccgctgccctgcgatggcgcaatggcgtttcgtaaggttgctattcctctggataagccgttagccgattacagcattacgcttggcgaagagggcaacgagtggggctatatcgaacagtcacgcccggaccatatcgccggtagcttcccgcaagagaagaaagagaaaggccgttactacctgatggccaaatatgagctgacggatttgcagtatcgcgcactctccggtgattgcgccaaacccgatatcaaaggtcgtctgccgaaggtcaatatcggctggatggacgccatgtcgattgccgataaatacaacctgtggctgcgaaaagagaagccggacgcactgccgcaggatgataagcagccgggctttttacgtctgccgacggaaaccgaatgggagtttgccgcgcgcggcgggctgtctgtctcgtcggcggagtttcgcgatcgccacttcccgatgccggaaggcctgaatggctatgtctggttcgcgggggcgcagtcagcaaataacaaacttcagcttaccggcctgcttaaaccgaacccgctgggtctgcacgatatgctcggcaacgttggcgaaatgatgtttgagccgtttcgcttaaataaacttgaccgcctgcatggcaaagcgggcggctatatcgtgcgcggcggcagctacttaacgccgcaggccgatattcgcagttcgctgcgcggggaagagccctattacaccgcgcaaggtgagaacagcagcaaagcgaacggcatgcgcctggtactggtctcaaccaccctcacctcgcgggatcgcatcaaagagattgaaaaagagtggcaggcgctgggtaccgagagcaaagcggcgaagaaaccgggcgaaggcgcggactcattacagaacctgaatgccatctccgccaaagtgcaggatgagggcgtgaaaaaggagctggagtcgctgcgtaatgaactgcgagccaatagtcagctgcgcgatgagcagcgcgaccaggcgatccgcacctctttgcagctgggcgcctttttgtgcaccaagatgaaagatgacggcgagtttctcgatcgccttaaccagctttatagcaaaacgtgtgccgccgggagccagctggatgccaactgttcgcgtcgccaggagcagctcgatcagcataaaaaagcgctggagtttatcaccagctattacgccgacacgctggtggatatgggcacgacctataacaagagcctgatcgatccgcagatgaccgtcgtgcagcaacagatggcggcgcgcggtaaaaccaatctgaatggttacctgaatacctactggggcaaccttcagggctactggaaagatggcaaagtggcgcgcgatgcgtggctgagcgcttgtaaaaaaaataattaa

SEQ ID NO: 976 - DNA, 1953 bp, Kosakonia cowanii
  source 1..1953: mol_type = genomic DNA
atgaaaacgagagtctggctgggcggattcctgtgcttaacggccgccaccatgggcgcgcacgccgccgatcaaaaaccgctgctgcaagaggggaaacatagcctttatcagcgtgttctcacctacccgggctgccagctggcaccgaaagcgggcgaggccggtaaagagcagccggcgtttagccgcttctacgtttatcagcgtagcaagcagggccaggatgagtggttgcaggtggggccggatagcttcggtcatgtttccggctggcttaaagccgcctgtaccgtcgactggaagatgcagctcacgctggcctttaccaacccggcgggtcgccacccgatgctctttttccgcgataagagcgacgtcgaatcgttgctgaataaccctaaaccggccgccgcgttcgatccgttattggccaatctgaagagcaataaacccgtgccgcaggtgctggcgaaagagccggattacatggtcgatcagcagaaaaacttctacctgctgccagtgttaggctctgacgatgtctttaccgacagcggtttccaggtgcgcgtgcttaatgtcgcctcggtcagtgaaaaagcgccggagaaagcggcaaaagcggctgacgagaagaacatgatgaagggcttttcggcgtcggtggtgtttgtaatcgactccaccatttcgatgggtccctatatcgaccgcactaaagaggcgatcgataagatctatcagcgcattgaaaaggagcacctccaggatcaggtgaagttcgggctggtggccttccgctctaatgtcaaagccgtgccgggactggagtatgacagcaagatgtatgtcgaccccaatacggtgaaagatggcaaagatttcctcgccaaagtacacgatctgaagcaagccacggtctccagcagcaaagtggatgaggatgcttatggcggtgtgatgacggcgcttgataaggtcgactggacgcagtttggcgcacgttacgtgatcctgattaccgacgccggcgcgctggagggcggagataacctctcctctacacatcttgatgccgcacaggttcgccaggaagcggcctatcgtggtgtggcgctttataccctgcacctcaaaaccccgagcggtaagaaaaaccatgctgctgccgaggcgcagtatcaggatctgacgctcaacccgttcctgcataaaccgctctactacccgatcgactccggcgatgtgaacaacttcggcaccatggtcgatagcctggcgaacgccatcactggccagatcaaaaccgcctggagcggcgaagagacggcgggcagcgcgctgggcgccagcgaagagtatgccggtaagaaagccgacccgctgctgagcgatgcggacaagctgagcaaagcgatgcgccttgcctatctcggtgaaaaacaggggacccaggcaccgccggtgtttaaatcctggattagcgatcgcgatttggtgaaccagaacattcccgccactgaagtgcgtgtcctgctgaccaaaagcgagttgagcgatctgagcgatgtgatgaagaagatcgtcaacgccgccaacgaagggttgatctcgccggacgatatgttcgccagcctgcgttcgctggccgcaacgatgggcaacgatccgaaccaggcgaaaagcaaaaatgccacacgcttaggtgaattgggtctgctgggtgaatacatcgaagggctgccgtacctgagtgaagtgctgagccttgatgaagagacctggaagagctgggatggccttgagcaggagcgatttattcgccgtctcaataccaagctgaactactaccagcgctataaccaggatgttgaccgctggatctcgctggcaccggacagcgatccgcgtgacaacgtctaccctgtgccgctggaaaacctgccgtaa

SEQ ID NO: 977 - DNA, 1233 bp, Kosakonia cowanii
  source 1..1233: mol_type = genomic DNA
gtgtcttccagcctgcctgaaacgcgccccaggatggggctactgctaaatatggcgctgcgcgatctgatacacgatcggaaagtggcgctctgtattgtcttctcgctgatcgcggtgatcgccccgctacttctcctgtttggcttaaagaacggtatcgtcagccagctgcgccacgatctgctcgacgatccacgcacgcgggaagtgcggatgaccggcaacggtaactacgatcttgcgtggctcaatgcgctcgcggcacgcccggaggttggcttctcaataccgcttacgcgatcgctgaatacccaggcagacctggtgcgtgacgggcaacattttgccgctggtgcagaggtgatcccttccgcgaaaggcgatccgctgctgcgcgagagcggagtgctgccgcacggcagcacggtggtactgagcaacagcgccgcccgtaagctcgacgtgaaagcgggcgacacgttccggctgtttatcagccgtaaacgcgacgggcagaaccagcgcacatcgctctctgtcagtgttggtgccattctcgacgaggcgcgctttgcccgccctgcgctatttgtcgacctgcctctgctggtggcgctggaagattatcgcgacggtttccaggtgccgctgctcggcgttaccgacggtgaaaacgcgcgcgagcggcataacttcgcgcgggcgcggctctatgccgccacgctggatgatgttgcccccctggcgcaatggcttgagtcgcagcatatcgaagcgataacccaggccgcgcagattgaagcggtgcgcgccatcgatcgcgtgctgggggtgattttcgcggtgatcgcctggatctcggcctcgggctgcattgcgtcgcttattggcgcgtttatcgccaatatcgatcgtaaacgcaaagatatggcagtgctgcgcctgctcggttttcgccgccaggcggtgacgctgttcatcatgatccaggcgctctgcctgacgggcgttgcgtttattgctggcctgttgatttatggcgcgggcagcgcgctgtttaaccaccttctgggcgctaatctccccgaaagcgcttttgtttgtcaccttgatcctggtcactttgccgccgccttcctgagcgtgctggccgtggcgctgggcgttgccgcgattggcgcgctgcgggcgttaaagatcgaacctgcggagagtttacgtgaaatttaa

SEQ ID NO: 978 - DNA, 786 bp, Kosakonia cowanii
  source 1..786: mol_type = genomic DNA
atgacagcagagaatctggcgcaaatgggtgccgcgcgggtggtgaagcggattaacgccgccggaataacggtgattgagaaagcgccggtcagcgaggtcgagtacgccttctaccatcaggttgcgcctgagctaaagcgcgcggaaatccttaccccagctctgctggcagccaatgccagttcgcgcgccctcaccctcgaagcgattccctcccctgttagccagcaaaatgttacgtgcgacgccatcgtgtcgatgctggcgcgcttacaccgctttgcgccggacagaaactggcactaccacacccatcgctggcccgacgcgcagctggagctgtgcctgcacctgctcgccttgccggaagaggccgccagcgtgctgcgccgctgtcagcgctacagcgataaattgtttgccgaagcgggcctgatttccggcgacagtaacgctggcaactgggggcagcgcgaaaacggtgagtttgtgctgtttgactgggagcggttcagcaccggtcacccggcgattgatttagcgccgctgataaagggcatgggcacgcctgaagagtatcaacgcctcgcggcgcgctactgccgctttaatccgcggtcagaaaacgatctcgctcgcgatattgccttagcgaaagcgtggattgtcagcgaagtcatcacgctccttcaccagcgacagaaagcggattttccgcgttttcagcactggtatcgctgttatttgcccgactggcttaaacagatcgaaaccgttatctga

SEQ ID NO: 979 - DNA, 789 bp, Kosakonia cowanii
  source 1..789: mol_type = genomic DNA
atgtctgccatggatttatccaaaatgggcacggctagggtcgtgcagaaaaccaacgattgcggtcagatagttattgaaaagtggcctgtcagcgacgttgagtgggccttttatcactctgcggcaacagcgcttaatcaggcagaggttgccactccatcgctcttgtctgctgatgccacctcacgccagttaacgatggagtatattcctcaccaggtcgaacaggccaatgtggcaaatgacgatgccatagcgatgctggggcgcctacatcgctatcctgcggatcctgaatggctttatcacccacatatatggacagaaaaagcgctggaaaacgctcttgtgctcctggctctacctgaaaaaagtgtacagcagctacggcggtttcagcagtgtggtaatgcgttatttggttaccagagcctaatatcaggcgacagtaatgcaggcaactggggaaggcgagaaaacggtgacatcgtgctttttgactgggaaaggtttggcaaaggcagtccggctatcgaccttgcgcccctgataaagggaatgggaactaaacactcgtttttgaatctttcagaacgctattgccagctctcctaccaccagaatagcaatgcgctggcccgagaaattgctattgccaaagcctggattgtcacggaagtaattgtcctgcttcatcggcggcaaaagacagcattccccatctacctgaactggtacagagaacaccttcccgactggctagacaacgtcgaaaaaatgttatga

SEQ ID NO: 980 - DNA, 231 bp, Kosakonia cowanii
  source 1..231: mol_type = genomic DNA
atgtccttaccgtggagcatcgatgacaacagagaatctggcgcaaatgggtgccgtaatccgcggtcaaaaaacgatctcactcgcgatattgccttagcgaaagcgtggattgtcagcgaagtgattacgctccttcaccagcgacagaaagcggattttccgcgttttcagcactggtatcgcggctatttgcccgactggcttaagcagatcgaaaccgttatctga

SEQ ID NO: 981 - DNA, 864 bp, Kosakonia cowanii
  source 1..864: mol_type = genomic DNA
atggccatttttatcagcctggatggctctgtgaaaaataaaatcctgtacctgttatctgctttttccgcatttcccgccgcagcacagtctcctgatgaagtagtggttaccggtggcaggtattatgccggtagcgtttttggccaacatgattatgcagcacacaccaacctcacgctgaaatctttcaggattatgcgtactgaagttacctaccggctttattcagctgttcacgaatgggctcttgagcgtggttatacattcggcgtcggatgtaacggagccacttacgaggactgcctcccggctgacacagacaacggtacacatccggtaaccagtgttgaatggtcagatgcagttatttttgcaaatgccctgagtgaaaaatcgggactgagacccgtctatcttagtaagaatggtgtccccgcgcgcgatagttccagttacgaatttacacaggatgcccgggctgatggttaccgcttgcccacagctgaggaatggcatgttgctgcgaggggaggtaagaccggactgatgaaggcccagtatggtttcaggttcgctggcagcaacaatcagaaagctgtcgcctggtttccagacttcaacgatccgcatttcggcactgcccgtgtgaaaagcctgcggcctaatgcgctcggtctgtatgacatgagtggtaacgtttccgaatggattgatgcttccgacactatttccggagttaaaatgtattatttttgcggcggcagttacctgatacatacgggtagtctggctggctgtgacacccacagcgccggctacgcactgccggacactggcttcagactggtgagaaaattttga

SEQ ID NO: 982 - DNA, 786 bp, Kosakonia cowanii
  source 1..786: mol_type = genomic DNA
atgacaacagagaatctggcgcaaatgggcgccgcgcgggtggtgaagcgggttaacgccaccggaatagtcgtgattgagaaagcgccggtcagcaaggttgagtacgccttctaccaccaggttgcgcccgagctaaaccgcgcggaaatccttaccccagccttgctggcagccgatgccagcacgcgcgccctcacccttgaagcgattccctaccctgttagccagcaaaatgttgcgaacgacgccatcgtgtcgatgctggcacggttacaccgctttgcgccggataaaaactggcactatcacccccatcgctggcccgacgcgcagctggagctgagcctgcaactgctcgccttaccggaagaggccgccagagtgttgcgtcgctgccagcgcgagagcgacagactgtttgccgaagcgggcctgatttctggcgacagtaatgctggcaactgggggcagcgcgagaacggcgagtttgtgctgtttgactgggagcggttcagcaccggtcacccggccattgatttagccccgctgattaaaggtatgggtacgcctgaagagtatcgacacctcgcggcgcgctactgccgatttaatccgcggtcagaaaatgatctcgctcgcgatattgccttagcgaaagcgtggattgtcagcgaagtgattacgctccttcacaagcgacagaaagcggattttccgcgttttcagcactggtatcgcagctatttgcccgactggctgagggaaatggaaaaaatgatgtga

SEQ ID NO: 983 - DNA, 1542 bp, Kosakonia cowanii
  source 1..1542: mol_type = genomic DNA
gtgaaatttaacctgctactgacgctggctgcggccgggttaggcttttcctgcgcggcaaacgcaacgtgggatgagaagttctggaacccaaaacccttggctgatgatgtgatcctgccgctgccctgcgatggcgcgatggcgtttcgtaaggttgctattcctctggataagccgttagccgattacagcattacgcttggcgaagagggtaacgagtggggctatatcgaacagtcacgcccggaccatatcgccggtagcttcccgcaagagaagaaagagaaaggccgttactacctgatggccaaatatgagctgacggatttgcagtatcgcgcactctccggtgattgcgccaaacccgatatcaaaggtcgtctgccgaaggtcaatatcggctggatggacgccatgtcgattgccgataaatacaacctgtggctgcgaaaagagaagccggacgcactgccgcaggatgataagcagccgggctttttacgtctgccgacggaaaccgaatgggagtttgccgcgcgcggcgggctgtctgtctcgtcggcggagtttcgcgatcgccacttcccgatgccggaaggcctgaatggctatgtctggttcgcgggggcgcagtcagcaaataacaaacttcagcttaccggcctgcttaaaccgaacccgctgggtctgcacgatatgctcggcaacgttggcgaaatgatgtttgagccgtttcgcttaaataaacttgaccgcctgcatggcaaagcgggcggctatatcgtgcgcggcggcagctacttaacgccgcaggccgatattcgcagttcgctgcgcggggaagagccctattacaccgcgcaaggtgagaacagcagcaaagcgaacggcatgcgcctggtactggtctcaaccaccctcacctcgcgggatcgcatcaaagagattgaaaaagagtggcaggcgctgggtaccgagagcaaagcggcgaagaaaccgggcgaaggcgcggactcattacagaacctgaatgccatctccgccaaagtgcaggatgagggcgtgaaaaaggagctggagtcgctgcgtaatgaactgcgagccaatagtcagctgcgcgatgagcagcgcgaccaggcgatccgcacctctttgcagttgggcgcctttttgtgcaccaagatgaaagatgacggcgagtttctcgatcgccttaaccagctttatagcaaaacgtgtgccgccgggagccagctggatgccaactgttcgcgtcgccaggagcagctcgatcagcataaaaaagcgctggagtttatcaccagctattacgccgacacgctggtggatatgggcacaacctataacaagagcctgatcgatccgcagatgaccgtcgttcagcaacagatggcggcgcgcggtaaaaccaatctgaatggttacctgaatacctactggggcaaccttcagggctactggaaagatggcaaagtggcgcgagatgcgtggctgagcgcttgtaaaaaaaataattaa

SEQ ID NO: 984 - DNA, 1953 bp, Kosakonia cowanii
  source 1..1953: mol_type = genomic DNA
atgaaaacgagagtctggctgggcggattcctgtgcttaaccgccgccaccatgggcgcgcacgccgccgatcaaaaaccgctgctgcaagaggggaaacatagcctttatcagcgtgttctcacctacccgggctgccagctggcaccgaaagcgggcgaggccggtaaagagcagccggcgtttagccgcttctacgtttatcagcgtagcaagcagggccaggatgagtggttgcaggtggggccggatagcttcggtcatgtttccggctggcttaaagccgcctgtaccgtcgactggaagatgcagctcacgctggcctttaccaacccggcgggtcgccacccgatgctctttttccgcgataagagcgacgtcgaatcgttgctgaataaccctaaaccggccgccgcgctcgatccgttattggccaatctgaagagcaataaacccgtgccgcaggtgctggcgaaagagccggattacatggtcgatcagcagaaaaacttctacctgctgccagtgttaggctctgacgatgtctttaccgacagcggtttccaggtgcgcgtgcttaatgtcgcctcggtcagtgaaaaagcgccggagaaagcggcaaaagcggctgacgagaagaacatgatgaagggcttttcggcgtcggtggtgtttgtaatcgactccaccatttcgatgggtccctatatcgaccgcactaaagaggcgatcgataagatctatcagcgcattgaaaaggagcacctccaggatcaggtgaagttcggtctggtggccttccgctctaatgtcaaagccgtgccggggctggagtatgacagcaagatgtatgttgaccccaatacggtgaaagatggcaaagatttcctcgccaaagtacacgatctcaagcaagccacggtctccagcagcaaagtggatgaggatgcttatggcggtgtgatgacggcgcttgataaggtcgactggacgcagtttggcgcacgttacgtgatcctgattaccgacgccggcgcgctggagggcggagataacctctcctctacacatcttgatgccgcacaggttcgccaggaagcggcctatcgtggtgtggcgctttataccctgcatctcaaaaccccgagcggtaagaaaaaccatgctgctgccgaggcgcagtatcaggatctgacgctcaacccgttcctgcataaaccgctctactacccgatcgactccggcgatgtgaacaacttcggcaccatggtcgatagcctggctaacgccatcaccggccagatcaaaaccgcctggagcggggaagagacggcgggcagcgcgctgggcgccagcgaagagtatgccggtaagaaagccgacccgctgctgagcgatgcggacaagctgagcaaagcgatgcgccttgcctatctcggtgaaaaacaggggacccaggcaccgccggtgtttaaatcctggatcagcgatcgcgatttggtgaaccagaacattcccgccactgaagtgcgtgtcctgctgaccaaaagcgagttgagcgatctgagcgatgtgatgaagaagatcgtcaacgccgccaacgaagggttgatctcgccggacgatatgttcgccagcctgcgttcgctggccgcaacgatgggcaacgatccgaaccaggcgaaaagcaaaaatgccacacgcttaggtgaattgggtctgctgggtgaatacatcgaagggctgccgtacctgagtgaagtgctgagccttgatgaagagacctggaagagctgggatggccttgagcaggagcgatttattcgccgtctcaataccaagctgaactactaccaacgctataaccaggatgttgaccgctggatctcgctggcaccggacagcgatccgcgtgacaacgtctaccctgtgccgctggaaaacctgccgtaa

SEQ ID NO: 985 - DNA, 1233 bp, Kosakonia cowanii
  source 1..1233: mol_type = genomic DNA
gtgtcttccagcctgcctgaaacgcgccccaggatggggctactgctaaatatggcgctgcgcgatctgatacacgatcggaaagtggcgctctgtattgtcttctcgctgatcgcggtgatcgccccgctacttctcctgtttggcttaaagaacggtatcgtcagccagctgcgccacgatctgctcgacgatccacgcacgcgggaagtgcggatgaccggcaacggtaactacgatcttgcgtggctcaatgcgctcgcggcacgcccggaggttggcttctcaataccgcttacgcgatcgctgaatacccaggcagacctggtgcgcgacgggcaacattttgccgctggtgcagaggtgatcccttccgcgaaaggcgatccgctgctgcgcgagagcggagtgctgccgcacggcagcacggtggtactgagcaacagcgccgcccgtaagctcgacgtgaaagcgggcgacacgttccggctgtttgtcagccgtaaacgcgacgggcagaaccagcgcacatcgctctccgtcagcgtcggtgccattctcgacgaggcgcgctttgcccgccctgcgctatttgtcgacctgcctctgctggtagcgctggaggattatcgcgacggtttccaggtgccgctgctcggcgttaccgacggtgaaaaagcgcgcgagcggcataactttgcgcgggcgcggctctatgccgccacgctggatgatgttgtccccctggcgcaatggcttgagtcgcagcatatcgaagcgataacccaggccgcgcagattgaagcggtgcgcgccatcgatcgcgtgctgggggtgattttcgcggtgatcgcctggatctcggcctcgggctgcattgcgtcgcttattggcgcgtttatcgccaatatcgatcgtaaacgcaaagatatggcagtgctgcgcctgctcggttttcgccgccaggcggtgacgctgttcatcatgatccaggcgctctgcctgacgggcgttgcgtttattgctggcctattgatttatggcgcgggcagcgcgctgtttaaccaccttctgggcgctaatctccccgaaagcgcttttgtttgtcaccttgatcctggtcactttgccgccgccttcctgagcgtgctggccgtggcgctgggcgttgccgcgattggcgcgctgcgggcgttaaagatcgaacctgcggagagtttacgtgaaatttaa

SEQ ID NO: 986 - DNA, 786 bp, Kosakonia cowanii
  source 1..786: mol_type = genomic DNA
atgacagcagagaatctggcgcaaatgggcgccgcgcgggtggtgaaacgagtgaacaccgccggaataacggtgatagaaaaagcgccggtcagcgaggtcgagtacgccttttaccatcaggttgcgcccgagctaaaccgcgcggaaatccttaccccagccttgctggctgccgatgccagttcgcgcgccctcacccttgaagcgattcccctgccggtaagccaggaaaatgtagcgtgcgacgccatcgtgtcgatgctggcgcggttacaccgcttttcaccggacaggcgctggcactatcaccaacatggctggcccgacgcgcagctggagctgagcctgcacctgctcgccttaccggaagaggccgccagagtgctgcgccgctgccagcgcgacagcgacaggctgtttgccgaagcgggactgatctccggcgacagcaacgctggtaactgggggcagcgcaagaacggtgagtttgtgctgtttgactgggagcggttcagcaccggtcacccggccattgatttagcgccgctgataaagggcatgggcacgcctgaagagtatcaacgcctcgcggcgcgttactgccgctttaatccgcggtcagaaaacgatctcgctcgcgatattgctttagcgaaagcgtggattgtcagcgaagtaatcacgctccttcaacagcgacagaaagcggattttccgcgttttcagcactggtatcgctgttatttgcccgactggcttaagcagatcgaaaccgttatctga

SEQ ID NO: 987 - DNA, 1233 bp, Kosakonia cowanii
  source 1..1233: mol_type = genomic DNA
gtgtcttccagcctgcctgaaacgcgccccaggatggggctactgctaaatatggcgctgcgcgatctgatacacgatcggaaagtggcgctctgtattgtcttctcgctgatcgcggtgatcgccccgctacttctcctgtttggcttaaagaacggtatcgtcagccagctgcgccacgatctgctcgacgatccacgcacgcgggaagtgcggatgaccggcaacggtaactacgatcttgcgtggctaaatgcgctcgcggcacgcccggaggttggcttctcaataccgcttacgcgatcgctgaatacccaggcagacctggtgcgcgacgggcaacattttgccgctggtgcagaggtgatcccttccgcgaaaggcgatccgctgctgcgcgagagcggagtgctgccgcacggcagcacggtggtactgagcaacagcgccgcccgtaagctcgacgtgaaagcgggcgacacgttccggctgtttatcagccgtaaacgcgacgggcagaaccagcgcacatcgctctccgtcagcgtcggtgccattctcgacgaggcgcgctttgcccgccctgcgctatttgtcgacctgcctctgctggtggcgctggaagattatcgcgacggtttccaggtgccgctgctcggcgttaccgacggtgaaaacgcgcgcgagcggcataactttgcgcgggcgcggctctatgccgccacgctggatgatgttgcacccctggcgcaatggcttgagtcgcagcatatcgaagcgataacccaggccgcgcagattgaagcggtgcgcgccatcgatcgcgtgctgggggtgattttcgcggtgatcgcctggatctcggcctcgggctgcattgcgtcgcttattggcgcatttatcgccaatatcgatcgtaaacgcaaagatatggcagtgctgcgcctgctcggttttcgccgccaggcggtgacgctgttcatcatgatccaggcgctctgcctgacgggcgttgcgtttatagctggcctgttgatttatggcgcgggcagcgcgctgtttaaccaccttctgggcgctaatctccccgaaagcgcttttgtttgtcaccttgatcctggccactttgccgccgccttcctgagcgtgctggccgtggcgctgggcgttgccgcgattggcgcgctgcgggcgttaaagatcgaacctgcggagagtttacgtgaaatttaa

SEQ ID NO: 988 - DNA, 786 bp, Kosakonia cowanii
  source 1..786: mol_type = genomic DNA
atgacaacagagaatctggcgcaaatgggcgccgcccgggtggtgaagcgggttaacgccaccggaatagccgtgattgagaaagcgccggttagcgaggtcgagtacgccttctaccaccaggttgcgcccgagctaaaccgcgcggaaatccttaccccagccttgctggcagccgatgccagcacgctcgccctcacccttgaagcgattccctaccctgttagccagcaaaatgtcgcgaacgacgctatcgtgtcgatgctggcacggttacaccgctttgcgccggataaaaactggcactatcacccccatcgctggcccgacgcccagctggcgctgagcctgcaactgctcgccttgccggaagaggccgccagagtgctgcgtcgctgccagcgcgagagcgacagactgtttgccgaagcgggcctgatttccggcgacagtaatgctggcaactgggggcagcgcgagaacggcgagtttgtgctgtttgactgggagcggttcagcaccggtcacccggccattgatttagccccgctgattaaaggcatgggcacgcctgaggagtatcgacatctcgcggcgcgctactgccgatttaatccgcggtcggaaaacgatctcgctcgcgatattgccttagcgaaagcgtggattgtcagcgaagtgattacgctccttcacaagcgacagaaagcggattttccgcgttttcagcactggtatcgcagctatttgcccgactggcttaagcagacaggaacacttatctga

SEQ ID NO: 989 - DNA, 786 bp, Kosakonia cowanii
  source 1..786: mol_type = genomic DNA
atgacaacagagaatctggcgcaaatgggcgccgcgcgggtggtgaagcgggttaacgccaccggaatagccgtgattgagaaagcgccggtcagcaaggttgagtacgccttctaccaccaggttgcgcccgagctaaaccgcgcggaaatccttaccccagccttgctggcagccgatgccagcacgcgcgccctcacccttgaagcgatcccctaccctgttagtcagcaaaatgtcgcgaacgacgctatcgtgtcgatgctggcacggttacaccgctttgcgccggataagaactggaactatcacccccatcgctggcccgatgcccagctggagctgagcctgcaactgctcgccttgccggaagaggccgccagagtgctgcgccgctgccagcgcgagagcgacagactgtttgccgaagcgggcctgatttccggcgacagtaatgctggcaactgggggcaacgcgagaacggcgagtttgtgctgtttgactgggagcggttcagcaccggtcacccggccattgatttagccccgctgattaaaggtatgggtacgcctgaagagtatcgacacctcgcggcgcgctactgccgatttaatccgcggtcggaaaatgatctcgctcgcgatattgccttagcgaaagcgtggattgtcagcgaagtgattacgctccttcacaagcgacagaaagcggattttccgcgttttcagcactggtatcgcagctatttgccagactggctgagggaagtggaaaaaatgaagtga

SEQ ID NO: 990 - DNA, 1542 bp, Kosakonia cowanii
  source 1..1542: mol_type = genomic DNA
gtgaaatttaacctgttactgacgctggctgcggccgggttaggcttttcctgcgcggcaaacgcaacgtgggatgagaagttctggaatccaaaacccttggctgatgatgtgatcctgccgctgccctgcgatggcgcaatggcgtttcgtaaggttgctattcctctggataagccgttagccgattacagcattacgcttggcgaagagggtaacgagtggggctatatcgaacagtcacgcccggaccatatcgccggtagcttcccgcaagagaagaaagagaaaggccgttactacctgatggccaaatatgagctgacggatttgcagtatcgcgcactctccggtgattgcgccaaacccgatatcaaaggtcgtctgccgaaggtcaatatcggctggatggacgccatgtcgattgccgataaatacaacctgtggctgcgaaaagagaagccggacgcactgccgcaggatgataagcagccgggctttttacgtctgccgacggaaaccgaatgggagtttgccgcgcgcggcgggctgtctgtctcgtcggcggagtttcgcgatcgccacttcccgatgccggaaggcctgaatggctatgtctggttcgcgggggcgcagtcagcaaataacaaacttcagcttaccggcctgcttaaaccgaacccgctgggtctgcacgatatgctcggcaacgttggcgaaatgatgtttgagccgtttcgcttaaataaacttgaccgcctgcatggcaaagcgggcggctatatcgtgcgcggcggcagctacttaacgccgcaggccgatattcgcagttcgctgcgcggggaagagccctattacaccgcgcaaggtgagaacagcagcaaagcgaacggcatgcgcctggtactggtctcaaccaccctcacctcgcgggatcgcatcaaagagattgaaaaagagtggcaggcgctgggtaccgagagcaaagcggcgaagaaaccgggcgaaggcgcggactcattacagaacctgaatgccatctccgccaaagtgcaggatgaaggtgtgaaaaaggagctggagtcgctgcgtaatgaactgcgagccaatagccagctgcgggatgagcaacgcgaccaggcgatccgcacctctttgcagctgggcgcctttttgtgcaccaagatgaaagatgacggcgagtttctcgatcgccttaaccagctttatagcaaaacgtgtgccgccgggagccagctggatgccaactgttcgcgtcgccaggagcagctcgatcagcataaaaaagcgctggagtttatcaccagctattacgccgacacgctggtggatatgggcacaacctataacaagagcctgatcgatccgcagatgaccgtcgttcagcaacagatggcggcgcgcggtaaaaccaatctgaatggttacctgaatacctactggggcaaccttcagggctactggaaagatggcaaagtggcgcgagatgcgtggctgagcgcttgtaaaaagaataattaa

SEQ ID NO: 991 - DNA, 1953 bp, Kosakonia cowanii
  source 1..1953: mol_type = genomic DNA
atgaaaacgagagtctggctgggcggattcctgtgcttaacggccgccaccatgggcgcgcacgccgccgatcaaaaaccgctgctgcaggaggggaaacatagcctttatcagcgtgttctcacctacccgggctgccagctggcaccgaaagcgggcgaggccggtaaagagcagccggcgtttagccgcttctacgtttatcagcgcagcaagcagggccaggatgagtggctgcaggtgggaccggatagcttcggtcatgtttccggctggcttaaagccgcctgtaccgtcgactggaagatgcagctcacgctggcgtttaccaacccggcgggtcgccacccgatgctctttttccgcgataagagcgacgtcgaatcgttgctgaataaccctaaaccggctgccgcgctcgatccgttattggccaatctgaagagcaataaacccgtgccgcaggtgctggcgaaagagccggattacatggtcgatcagcagaaaaacttctacctgctgccagtgttaggctctgacgatgtctttaccgacagcggtttccaggtgcgcgtgcttaatgtcgcctcggtcagtgaaaaagcgccggagaaagcggcaaaagcggctgacgagaagaacatgatgaagggcttttcggcgtcggtggtgtttgtaatcgactccaccatttcgatgggcccctatatcgaccgcaccaaagaggcgatcgataagatctatcagcgcattgaaaaggagcacctccaggatcaggtgaagttcggtctggtggccttccgctctaatgtcaaagccgtgccggggctggagtatgacagcaagatgtatgttgaccccaatacggtgaaagatggcaaagatttcctcgccaaagtacacgatctgaagcaagccacggtctccagcagcaaagtggatgaggatgcttatggcggtgtgatgacggcgcttgataaggtcgactggacgcagtttggcgcacgttacgtgatcctgattaccgacgccggcgcgctggagggcggagataacctctcctctacacatcttgatgccgcacaggttcgccaggaagcggcctatcgtggtgtggcgctttataccctgcatctcaaaaccccgagcggtaagaaaaaccatgctgctgccgaggcgcagtatcaggatctgacgctcaacccgttcctgcataaaccgctctactacccgatcgactccggcgatgtgaacaacttcggcaccatggtcgatagcctggcgaacgccatcactggccagatcaaaaccgcctggagcggggaagagacggcgggcagcgcgctgggcgccagcgaagagtatgccggtaagaaagccgacccgctgctgagcgatgcggacaagctgagcaaagcgatgcgccttgcctatctcggtgaaaaacaggggacccaggcaccgccggtgtttaaatcctggatcagcgatcgcgatttggtgaaccagaacattcccgccactgaagtgcgtgtcctgctgaccaaaagcgagttgagcgatctgagcgatgtgatgaagaagatcgtcaacgccgccaacgaagggttgatctcgccggacgatatgttcgccagcctgcgttcgctggccgcaacgatgggcaacgatccgaaccaggcgaaaagcaaaaacgccacacgcttaggtgaattgggtctgctgggtgaatacatcgaagggctgccgtacctgagtgaagtgctgagccttgatgaagagacctggaagagctgggatggccttgagcaggagcgatttattcgccgtctcaataccaagctgaactactaccaacgctataaccaggatgttgaccgctggatctcgctggcaccggacagcgatccgcgtgacaacgtctaccctgtgccgctggaaaacctgccgtaa

SEQ ID NO: 992 - DNA, 1233 bp, Kosakonia cowanii
  source 1..1233: mol_type = genomic DNA
gtgtcttccagcctgcctgaaacgcgccccggaatggggctactgctgaatatggcgctgcgcgatctgatccacgatcggaaagtggcgctctgtattgtcttctcgctgatcgcggtgatcgccccgctactccttctgtttggcttaaagaacggtatcgtcagccagctgcgccacgatctgctcgacgatccgcgcacgcgggaagtgcgcatgaccggcaacggtaactacgatcttgcatggctcaacgcgcttgctgcgcgcccggaggttggcttctcaataccgcttacgcgatcgctgaatacccaggcagacctggtgcgcgacgggcaacattttgccgctggtgcagaggtgatcccttccgcgaaaggcgatccgctgctgcgcgagagcggagtgctgccgcacggcagcacggtggtactgagccacagcgccgcccgtaagctcgacgtgaaagcgggcgacacgttccggctgtttatcagccgtaaacgcgacgggcagaaccagcgcacatcgctctctgtcagcgtcggtgccattctcgacgaggcgcgctttgcccgcccggcgctgtttgtcgacctgcctctgctggtagcgctggaggattatcgcgacggtttccaggtgccgctgctcggcgttaccgacggtgaaaacgcgcgcgagcggcgtaactttgcacgcgcacggctctatgccgccacgctggatgatgttgcacccctggcgcaatggcttgagtcgcagcatatcgaagcgataacccaggccgcgcagattgaagcggtgcgcgccatcgatcgcgtgctgggggtgattttcgcggtgatcgcctggatctcggcctcgggctgcattgcgtcgcttattggcgcatttatcgccaatatcgatcgtaaacgtaaagatatggcagtgctgcgcctgctcggttttcgccgccaggcggtgacgcttttcatcatgattcaggcgctctgcctgacgggcgttgcgtttatcgctggcctgctgatttatggcgcgggcagcgcgctgtttaaccaccttctgggcgctaatctccccgaaagcgcttttgtttgtcaccttgatccttgccactttgccgccgccttcctgagcgtgctggccgtggcgctgggcgttgccgcgattggcgcgctgcgggcgttaaagatcgaacctgcggagagtttacgtgaaatttaa

SEQ ID NO: 993 - DNA, 786 bp, Kosakonia cowanii
  source 1..786: mol_type = genomic DNA
atgacaacagagaatctggcgcaaatgggcgccgcgcgggtggtgaagcgggttaacgccaccggaatagccgtgattgagaaagcgccggtcagcaaggttgagtacgccttctaccaccaggttgcgcccgagctaaaccgcgcggaaatccttaccccagccttgctggcagccgatgccagcacgcgcgccctcacccttgaagcgattccctaccctgttagccagcaaaatgtcgcgaacgacgctatcgtgtcgatgctggcacggttacaccgctttgcgccggataaaaactggcactaccacccccatcgctggtccgacgcgcagctggcgctgagcctgcaactgctcgccttaccggaagaggccgccagagtgctgcgtcgctgccagcgcgagagcgacagactttttgccgaagcgggcctgatttctggcgacagtaatgctggcaactgggggcaacgcgagaacggcgagtttgtgctgtttgactgggagcggttcagcaccggtcacccggccattgatttagccccgctgattaaaggcatgggcacgcctgaggagtatcgacacctcgcggcgcgctactgccgatttaatccgcggtcagaaaacgatctcgctcgcgatattgccttagcgaaagcgtggattgtcagcgaagtgattacgctccttcacaagcgacagaaagcggattttccgcgttttcagcactggtatcgcagctatttgcccgactggcttaagcagacaggaatacttatctga

SEQ ID NO: 994 - DNA, 525 bp, Kosakonia cowanii
  source 1..525: mol_type = genomic DNA
atgctggcgcgcttacaccgctttgcgccggatagaaactggcactatcacccccatcgctggcccgacgcgcagctggagctgagcctgcacctgctcgctttgccggaagcagccgccagagcgctgcgccgctgccagcgcgacagcgacaggctgtttgccgaagcgggcctgatttccggcgacagcaacgccggcaactgggggcagcgcgaaaacggcgagtttgtgctgtttgactgggagcggttcagcaccggtcacccggccattgatttagccccgctgattaaaggcatgggcacgcctgaagagtatcgacacctcgcggcgcgctactgccgatttaatccgcggtcagaaaacgatctcacacgcgatattgccttagcgaaagcgtggattgtcagcgaagtgattacgctcctttacaagcgacagaaagcggattttccgcgttttcagcactggtatcgcagctatttgcccgactggcttaaggaagtggaaaaaattatgtga

SEQ ID NO: 995 - DNA, 1542 bp, Kosakonia cowanii
  source 1..1542: mol_type = genomic DNA
gtgaaatttaacctgttactgacgctggctgcggccgggttaggcttttcctgcgcggcaaacgcaacgtgggatgagaagttctggaacccaaaacccctggccgatgatgtgatcctgccgctgccctgcgatggcgcaatggcgtttcgtaaggttgctattcctctggataagccgttagccgattacagcattacgcttggcgaagagggcaacgagtggggctatatcgaacagtcacgcccggaccatatcgccggtagcttcccgcaagagaaaaaagagaaaggccgttactacctgatggccaaatatgagctgacggatttgcagtatcgcgcactttccggtgattgcgccaaacccgatatcaaaggtcgtctgccgaaggtcaatatcggctggatggacgccatgtcgattgccgataaatacaacctgtggctgcgaaaagagaagccggacgcactgccgcaggatgataagcagccaggctttttacgtctgccgacggaaaccgaatgggagtttgccgcgcgcggcgggctatctgtctcttcggcggagtttcgcgatcgccacttcccgatgccggaaggcctgaatggctatgtctggttcgcgggggcgcagtcagcgaataacaaactccagcttaccggcctgcttaaaccgaatccgctgggtctgcacgatatgcttggtaacgctggcgaaatgatgtttgagccgtttcgcttaaataaacttgaccgcctgcatggcaaagcgggcggctatatcgtgcgcggcggcagctacttaacgccgcaggccgatatccgcagctcgctgcgcggggaagagccctattacaccgcgcaaggcgagaacagcagcaaagcgaacggcatgcgcctggtactggtctcaaccaccctcacctcgcgggatcgcattaaagagattgaaaaagagtggcaggcgctgggtaccgagagcaaagcggcgaagaaaccgggcgaaggcgcggactcattacagaacctgaatgccatctccgccaaagtgcaggatgaaggcgtgaaaaaggagctggagtcgctgcgtaatgaactacgagccaatagccagctgcgcgatgagcagcgcgaccaggcgatccgcacctctttgcaactgggcgcctttttgtgcaccaagatgaaggatgacggcgagtttctcgatcgccttaatcagctttatggcaaaacgtgcgccgccggtagccagctcgacgccaactgttcgcgtcgccaggagcagctcgatcagcataaaaaagcgctggagtttatcaccagctattacgccgacacgctggtggatatgggcacgacctataacaagagcctgatcgatccgcagatgaccgtcgtgcagcagcagatggcggcgcgcggtaaaaccaatctaaacggttacctgaatacctactggggcaatcttcagggctactggaaagatggcaaagtggcgcgcgatgcgtggctgagcgcttgtaaaaaaaataattaa

SEQ ID NO: 996 - DNA, 1953 bp, Kosakonia cowanii
  source 1..1953: mol_type = genomic DNA
atgaaaacgagagtctggctgggcggatttctgtgcttaacggccgccaccatgggcgcgcacgccgccgatcaaaaaccgctgctgcaggaggggaaacatagcctttatcagcgtgttctcacctacccgggctgccagctggcaccgaaagcgggcgaggccggtaaagagcagccggcgtttagccgcttctacgtttatcagcgcagcaagcagggccaggatgagtggctgcaggtcgggccggatagcttcggtcatgtttccggctggcttaaagccgcctgtaccgtcgactggaagatgcagctcacgctggcgtttaccaacccggcgggtcgccacccgatgctctttttccgcgataagagcgacgtcgaatcgttgctgaataacccaaaaccggctgccgcgctcgatccgttattggccaatctgaagagcaataaacccgtgccgcaggtgctggcgaaagagccggattacatggtcgatcagcagaaaaacttctatctgctgccagtgttaggctctgacgatgtctttaccgacagcggtttccaggtgcgcgtgcttaatgtcgcctcggtcagtgaaaaagcgccggagaaagcggcaaaagcggctgacgagaagaacatgatgaagggcttttcggcgtcggtagtgtttgtaatcgactccaccatttcgatgggcccctatatcgaccgcaccaaagaggcgatcgataagatctatcagcgcattgaaaaggagcatctccaggatcaggtgaagtttggtctggtggccttccgctccaatgtcaaagccgtgccggggctggagtatgacagcaagatgtacgtcgaccccaacacggtgaaagatggcaaagatttcctcgccaaagtacacgatctgaagcaagccacggtctccagtagcaaagtggaagaggatgcttatggcggcgtgatgacggcgcttgataaggtcgactggacgcagtttggcgcgcgttacgtgatcctgattaccgacgccggcgcgctggagggcggggataacctctcctccacgcatcttgatgccgcgcaggttcgccaggaagcggcctaccgtggtgtggcgctctataccctgcatctcaaaaccccgagcggtaagaaaaaccatgctgccgccgaggcgcagtatcaggatctaacgctcaacccgttcctgcataaaccgctctactacccgatcgactccggcgatgtgaacaacttcggcgctatggtcgatagcctggcgaatgccatcaccggccagattaaaaccgcctggagcggcgaagagacggcgggcagcgcgctgggtgccagcgaagagtatgccggtaagaaagccgacccgctgctgagcgatgcggacaagctgagcaaagcgatgcgccttgcctatctcggcgaaaaacaggggacccaggcaccgccggtgtttaaatcctggatcagcgaccgcgatttagtgaaccagaacattcccgccaccgaagtgcgtgtcctgctgaccaaaagcgagttgagcgatctgagtgatgtgatgaagaagatcgtcaatgccgctaacgaagggttgatctcgccggacgatatgttcgccagcctgcgttcgctggccgcaacgatgggcaacgatccgaaccaggcgaaaagcaaaaacgccacgcgcttaggtgaattggggctgctgggtgaatacattgaagggctgccgtacctgagtgaagtactgagccttgatgaagagacctggaagagctgggatggccttgagcaggagcggtttattcgccgtctcaataccaagctgaactactaccagcgctataaccaggatgttgaccgctggatctcgctggcaccggacagcgatccgcgtgacaacgtttaccctgtgccgctggaaaacctgccgtaa

SEQ ID NO: 997 - DNA, 1233 bp, Kosakonia cowanii
  source 1..1233: mol_type = genomic DNA
gtgtcttccagcctgcctgaaacgcgccccaggatggggctactgctaaatatggcgctgcgcgatctgatacacgatcggaaagtggcgctctgtattgtcttctcgctgatcgcggtgatcgccccgctacttctcctgtttggcttaaagaacggtatcgtcagccagctgcgccacgatctgctcgacgatccacgcacgcgggaagtgcggatgaccggcaacggtaactacgatcttgcgtggctcaacgcgctcgcggcacgcccggaagttggcttctcaataccgcttacgcgatcgctgaatacccaggcagacctggtgcgcgacgggcaacattttgccgctggtgcagaggtgatcccttccgcgaaaggcgatccgctgctgcgtgagagcggagtgctgccgcacggcagcaccgtggtactgagcaacagcgctgcccgtaagctcgacgtgaaagcgggcgacacgttccggctgtttgtcagccgtaaacgcgacgggcagaaccagcgcacatcgctctccgtcagcgtcggtgccattctcgacgaggcgcgctttgcccgccctgcgctgtttgtcgacctgcctctgctggtggcgctggaagattatcgcgacggtttccaggcgccgctgctcggcgttaccgacggtgaaaacgcgcgcgagcggcataactttgcgcgcgcacggctctatgccgccacgctggatgatgttgcccccctggcgcaatggcttgagtcgcaacatatcgaagcgataacccaggccgcgcagattgaagcggtgcgcgccatcgatcgcgtgctgggggtgattttcgcggtaatcgcctggatctcggcctcgggctgcattgcgtcgcttattggcgcgtttatcgccaatatcgatcgtaaacgcaaagatatggcagtgctgcgcctgctcggttttcgccgccaggcggtgacgctgtttatcatgatccaggcgctctgcctgacgggcgttgcgtttattgctggcctgttgatttatggcgcgggcagcgcgctgtttaaccaccttctgggcgctaatctccccgaaagcgcttttgtttgtcaccttgatcctggccactttgccgccgccttcctgagcgtgctggccgtggcgctgggcgttgccgcgattggcgcgctgcgggcgttaaagatcgaacctgcggagagtttacgtgaaatttaa

SEQ ID NO: 998 - DNA, 786 bp, Kosakonia cowanii
  source 1..786: mol_type = genomic DNA
atgacaacagagaatctggcgcaaatgggcgccgcccgggtagtgaagcgggttaacgccaccggaatagccgtgattgagaaagcgccggtcagcaaggttgagtacgccttctaccaccaggttgcgcccgagctaaaccgcgcggaaatccttaccccagccttgctggcagccgatgccagcacgcgcgccctcacccttgaagcgattccctaccctgttagccagcaaaatgtcgcgaacgacgctatcgtgtcgatgctggcacggttacaccgctttgcgccggataaaaactggcactaccacccccatcgctggcccgacgcgcagctggcgctgagcctgcaactgctcgccttaccggaagaggccgccagagtgctgcgtcgctgccagcgcgagagcgacaggctttttgccgaagcgggcctgatttctggcgacagtaatgctggcaactgggggcagcgcgagaacggcgagtttgtgctctttgactgggaacggttcagcaccggtcacccggccattgatttagccccgctgattaaaggcatgggcacgcctgaggagtatcgacacctcgcggcgcgctactgccgatttaatccgcggtcggaaaatgatctcgctcgcgatattgccttagcgaaagcgtggattgtcagcgaagtgattacgctccttcacaagcgacagaaagcggattttccgcgttttcagcactggtatcgcagctatttgcccgactggctgagggaaatggaaaaaatgatgtga

SEQ ID NO: 999 - DNA, 1542 bp, Kosakonia cowanii
  source 1..1542: mol_type = genomic DNA
gtgaaatttaacctgttactgacgctggctgcggccgggttaggcttttcctgcgcggcaaacgcaacgtgggatgagaagttctggaacccaaaacccttggctgatgatgtgatcctgccgctgccctgcgatggcgcgatggcgtttcgtaaggttgctattcctctggataagccgttagccgattacagcattacgcttggcgaagagggtaacgagtggggctatatcgaacagtcacgcccggaccatatcgccggtagcttcccgcaagagaagaaagagaaaggccgttactacctgatggccaaatatgagctgacggatttgcagtatcgcgcactctccggtgattgcgccaaacccgatatcaaaggtcgtctgccgaaggtcaatatcggctggatggacgccatgtcgattgccgataaatacaacctgtggctgcgaaaagagaagccggacgcactgccgcaggatgataagcagccgggctttttacgtctgccgacggaaaccgaatgggagtttgccgcgcgcggcgggctgtctgtctcgtcggcggagtttcgcgatcgccacttcccgatgccggaaggcctgaatggctatgtctggttcgcgggggcgcagtcagcaaataacaaacttcagcttaccggcctgcttaaaccgaacccgctgggtctgcacgatatgctcggcaacgttggcgaaatgatgtttgagccgtttcgcttaaataaacttgaccgcctgcatggcaaagcgggcggctatatcgtgcgcggcggcagctacttaacgccgcaggccgatattcgcagttcgctgcgcggggaagagccctattacaccgcgcaaggtgagaacagcagcaaagcgaacggcatgcgcctggtactggtctcaaccaccctcacctcgcgggatcgcatcaaagagattgaaaaagagtggcaggcgctgggtaccgagagcaaagcggcgaagaaaccgggcgaaggcgcggactcattacagaacctgaatgccatctccgccaaagtgcaggatgagggcgtgaaaaaggagctggagtcgctgcgtaatgaactgcgagccaatagtcagctgcgcgatgagcagcgcgaccaggcgatccgcacctctttgcagttgggcgcctttttgtgcaccaagatgaaagatgacggcgagtttctcgatcgccttaaccagctttatagcaaaacgtgtgccgccgggagccagctggatgccaactgttcgcgtcgccaggagcagctcgatcagcataaaaaagcgctggagtttatcaccagctattacgccgacacgctggtggatatgggcacgacctataacaagagcctgatcgatccgcagatgaccgtcgttcagcaacagatggcggcgcgcggtaaaaccaatctgaatggttacctgaatacctactggggcaaccttcagggctactggaaagatggcaaagtggcgcgagatgcgtggctgagcgcttgtaaaaaaaataattaa

SEQ ID NO: 1000 - DNA, 1953 bp, Kosakonia cowanii
  source 1..1953: mol_type = genomic DNA
atgaaaacgagagtctggctgggcggattcctatgcttaacggccgccaccatgggcgcgcacgccgccgatcaaaaaccgctgctgcaggaggggaaacatagcctttatcagcgtgttctcacctacccgggctgccagctggcaccgaaagcgggcgaggccggtaaagagcagccggcgtttagccgcttctacgtttatcagcgtagcaagcagggccaggatgagtggttgcaggtggggccggatagcttcggtcatgtttccggctggcttaaagccgcctgtaccgtcgactggaagatgcagctcacgctggcctttaccaacccggcgggtcgccacccgatgctctttttccgcgataagagcgacgtcgaatcgttgctgaataaccctaaaccggccgccgcgctcgatccgttattggccaatctgaagagcaataaacccgtgccgcaggtgctggcgaaagagccggattacatggtcgatcagcagaaaaacttctacctgctgccagtgttaggctctgacgatgtctttaccgacagcggtttccaggtgcgcgtgcttaatgtcgcctcggtcagtgaaaaagcgccggagaaagcggcaaaagctgctgacgagaagaacatgatgaagggcttttcggcgtcggtggtgtttgttatcgactccaccatttcgatgggtccctatatcgaccgcactaaagaggcgatcgataagatctatcagcgcattgaaaaggagcacctccaggatcaggtgaagttcggtctggtggccttccgctctaatgtcaaagccgtgccggggctggagtatgacagcaagatgtatgttgaccccaatacggtgaaagatggcaaagatttcctcgccaaagtacacgatctgaagcaagccacggtctccagcagcaaagtggatgaggatgcttatggcggtgtgatgacggcgcttgataaggtcgactggacgcagtttggcgcacgttacgtgatcctgattaccgacgccggcgcgctggagggcggagataacctctcctccacgcatcttgatgccgcacaggttcgccaggaagcggcctatcgtggtgtggcgctctataccctgcatctcaaaaccccgagcggtaagaaaaaccatgctgctgccgaggcgcagtatcaggatctgacgctcaacccgttcctgcataaaccgctctactacccgatcgactccggcgatgtgaacaacttcggcaccatggtcgatagcctggcgaacgccatcactggccagatcaaaaccgcctggagcggggaagagacggcgggcagcgcgctgggtgccagcgaagagtacgccggtaagaaagccgacccgctgctgagcgatgcggacaagctgagcaaagcgatgcgccttgcctatctcggtgaaaaacaggggacccaggcaccgccggtgtttaaatcctggattagcgatcgcgatttggtgaaccagaacattcccgccactgaagtgcgtgtcctgctgaccaaaagcgagttgagcgatctgagcgatgtgatgaagaagatcgtcaacgccgccaacgaagggttgatctcgccggacgatatgttcgccagcctgcgttcgctggccgcaacgatgggcaacgatccgaaccaggcgaaaagcaaaaatgccacacgcttaggtgaattgggtctgctgggtgaatacatcgaagggctgccgtacctgagtgaagtgctgagccttgatgaagagacctggaagagctgggatggccttgagcaggagcgatttattcgccgtctcaataccaagctgaactactaccaacgctataaccaggatgttgaccgctggatctcgttggcaccggacagcgatccgcgtgacaacgtctaccctgtgccgctggaaaacctgccgtaa

SEQ ID NO: 1001 - DNA, 1233 bp, Kosakonia cowanii
  source 1..1233: mol_type = genomic DNA
gtgtcttccagcctgcctgaaacgcgccccaggatggggctactgctaaatatggcgctgcgcgatctgatacacgatcggaaagtggcgctctgtattgtcttctcgctgatcgcggtgatcgccccgctacttctcctgtttggcttaaagaacggtatcgtcagccagctgcgccacgatctgctcgacgatccacgcacgcgggaagtgcggatgaccggcaacggtaactacgaccttgcgtggctcaacgcgcttgctgcacgcccggaggttggcttctcaataccgcttacgcgatcgctgaatacccaggcagacctggtgcgcgacgggcaacattttgccgctggtgcagaggtgatcccttccgcgaaaggcgatccgctgctgcgcgagagcggagtgctgccgcacggcagcacggtggtactgagcaacagcgccgcccgtaagctcgacgtgaaagcgggcgacacgttccggctgtttatcagccgtaaacgcgacgggcagaaccagcgcacatcgctctccgtcagcgtcggtgccattctcgacgaggcgcgctttgcccgccctgcgctatttgtcgacctgcctctgctggtggcgctggaggattatcgcgacggtttccaggtgccgctgctcggcgttaccgacggtgaaaacgcgcgcgagcggcataactttgcgcgggcgcggctctatgccgccacgctggatgatgttgcccccctggcgcaatggcttgagtcgcagcatatcgaagcgataacccaggccgcgcagattgaagcggtgcgcgccatcgatcgcgtgctgggggtgattttcgcggtgatcgcctggatctcggcctcaggctgcattgcgtcgcttattggcgcatttatcgccaatatcgatcgtaaacgcaaagatatggcagtgctgcgcctgctcggttttcgccgccaagcggtgacgctgttcatcatgatccaggcgctctgcctgacgggcgttgcgtttatagctggcctgttgatttatggcgcgggcagcacgctgtttaactaccttctgggcgctaatctccccgaaagcgcttttgtttgtcaccttgatcctggtcactttgccgccgccttcctgagcgtgctggccgtggcgctgggcgttgccgcgattggcgcgctgcgggcgttaaagatcgaacctgcggagagtttacgtgaaatttaa

SEQ ID NO: 1002 - DNA, 786 bp, Kosakonia cowanii
  source 1..786: mol_type = genomic DNA
atgacaacaaaggatctggcgcaaatgggcgccgcgcgggtggtgaaacgagtgaacaccgccggaataacggtgattgagaaagcaccggtcagcgaggtcgagtacgccttttaccatcaggttgcgcctgagctaaaccgcgcgaaaatccttaccccagccctgctggcagccgatgccagtacgcgcgccctcacccttgaagcgattccctaccctgttagccagcaaaatgttacgtgcgacgccatcgtgtcgatgctggcacggttacaccgcttttcgccggatagcaactggcactaccacacccatcgctggcccgacgcgcagttggagctgagcctgcacctgctcgctttgccggaagcagccgccagagcgctgcgccgctgccagcgcgacagtgacaggctgtttgccgaagcgggcctgatttccggcgacagcaacgctggtaactgggggcagcgcgaaaacggtgagtttgtgctgtttgactgggagcggttcagcaccggtcacccggcgattgatttagcgccgctgattaaaggtatgggcacgcctgaagagtatcgacacctcgcggcgcgttactgccgctttaatccgcggtcagaaaatgatctggtacgcgatattgctttagcaaaagcgtggattgtcagcgaagtgattacgctccttcaccagcgacagaaagcggattttccgcgttttcagcactggtatcgctgttatttgcccgactggcttaagcagatcgaaaccgttatctga

SEQ ID NO: 1003 - DNA, 786 bp, Kosakonia cowanii
  source 1..786: mol_type = genomic DNA
atgacaacagagaatctggcgcaaatgggcgccgcgcgggtggtgaagcgggttaacgccaccggaatagccgtgattgagaaagcgccggtcagcaaggttgagtacgccttctaccaccaggttgcgcccgagctaaaccgcgcggaaatccttaccccagccttgctggcagccgatgccagcacgcgcgccctcacccttgaagcgattccctaccctgttagccagcaaaatgtcgcgaacgacgctatcgtgtcgatgctggcacggttacaccgctttgcgccggataagaactggaactatcacccccatcgctggcccgacgcgcagctggcgctgagcctgcaactgctcgccttgccggaagaggccgccagcgtgctgcgccgctgccagcgcgagagcgacaggctttttgccgaagcgggcctgatttctggcgacagtaatgctggcaactgggggcagcgcgagaacggcgagtttgtgctgtttgactgggagcggttcagcaccggtcacccggccattgatttagccccgctgattaaaggcatgggcacgcctgaggagtatcgacacctcgcggcgcgctactgccgatttaatccgcggtcggaaaacgatctcgctcgcgatattgccttagcgaaagcgtggattgtcagcgaagtgattacgctccttcacaagcgacagaaagcggattttccgcgttttcagcactggtatcgcagctatttgcccgactggctgagggaagtggaaaaaatgaagtga

SEQ ID NO: 1004 - DNA, 1542 bp, Kosakonia cowanii
  source 1..1542: mol_type = genomic DNA
gtgaaatttaacctgttactgacgctggctgcggccgggttaggcttttcctgcgcggcaaacgcaacgtgggatgagaagttctggaatccaaaacccttggctgatgatgtgatcctgccgctgccctgcgatggcgcgatggcgtttcgtaaggttgctattcctctggataagccgttagccgattacagcattacgcttggcgaagagggtaacgagtggggctatatcgaacagtcacgcccggaccatatcgccggtagcttcccgcaagagaagaaagagaaaggccgttactacctgatggccaaatatgagctgacggatttgcagtatcgcgcactctccggtgattgcgccaaacccgatatcaaaggtcgtctgccgaaggtcaatatcggctggatggacgccatgtcgattgccgataaatacaacctgtggctgcgaaaagagaagccggacgcactgccgcaggatgataagcagccgggctttttacgtctgccgacggaaaccgaatgggagtttgccgcgcgcggcgggctgtctgtctcgtcggcggagtttcgcgatcgccacttcccgatgccggaaggcctgaatggctatgtctggttcgcgggggcgcagtcagcaaataacaaacttcagcttaccggcctgcttaaaccgaacccgctgggtctgcacgatatgctcggcaacgttggcgaaatgatgtttgagccgtttcgcttaaataaacttgaccgcctgcatggcaaagcgggcggctatatcgtgcgcggcggcagctacttaacgccgcaggccgatattcgcagttcgctgcgcggggaagagccctattacaccgcgcaaggtgagaacagcagcaaagcgaacggcatgcgcctggtactggtctcaaccaccctcacctcgcgggatcgcatcaaagagattgaaaaagagtggcaggcgctgggtaccgagagcaaagcggcgaagaaaccgggcgaaggcgcggactcattacagaacctgaatgccatctccgccaaagtgcaggatgaaggtgtgaaaaaggagctggagtcgctgcgtaatgaactgcgagccaatagccagctgcgggatgagcaacgcgaccaggcgatccgcacctctttgcagctgggcgcctttttgtgcaccaagatgaaagatgacggcgagtttctcgatcgccttaaccagctttatagcaaaacgtgtgccgccgggagccagctggatgccaactgttcgcgtcgccaggagcagctcgatcagcataaaaaagcgctggagtttatcaccagctattacgccgacacgctggtggatatgggcacgacctataacaagagcctgatcgatccgcagatgaccgtcgtgcagcaacagatggcggcgcgcggtaaaaccaatctgaatggttacctgaatacctactggggcaaccttcagggctactggaaagatggcaaagtggcgcgcgatgcgtggctgagcgcttgtaaaaaaaataattaa

SEQ ID NO: 1005 - DNA, 1953 bp, Kosakonia cowanii
  source 1..1953: mol_type = genomic DNA
atgaaaacgagagtctggctgggcggattcctgtgcttaacggccgccaccatgggcgcgcacgccgccgatcaaaaaccgctgctgcaggaggggaaacatagcctttatcagcgtgttctcacctacccgggctgccagctggcaccgaaagcgggcgaggccggtaaagagcagccggcgtttagccgcttctacgtttatcagcgcagcaagcagggccaggatgagtggctgcaggtgggaccggatagcttcggtcatgtttccggctggcttaaagccgcctgtaccgtcgactggaagatgcagctcacgctggcgtttaccaacccgtcgggtcgccacccgatgctctttttccgcgataagagcgacgtcgaatcgttgctgaataaccctaaaccggctgccgcgctcgatccgttattggccaatctgaagagcaataaacccgtgccgcaggtgctggcgaaagagccggattacatggtcgatcagcagaaaaacttctacctgctgccagtgttaggctctgacgatgtctttaccgacagcggtttccaggtgcgcgtgcttaatgtcgcctcggtcagtgaaaaagcgccggagaaagcggcaaaagcggctgacgagaagaacatgatgaagggcttttcggcgtcggtggtgtttgtaatcgactccaccatttcgatgggcccctatatcgaccgcaccaaagaggcgatcgataagatctatcagcgcattgaaaaggagcacctccaggatcaggtgaagttcggtctggtggccttccgctctaatgtcaaagccgtgccggggctggagtatgacagcaagatgtatgttgaccccaatacggtgaaagatggcaaagatttcctcgccaaagtacacgatctgaagcaagccacggtctccagcagcaaagtggatgaggatgcttatggcggtgtgatgacggcgcttgataaggtcgactggacgcagtttggcgcacgttacgtgatcctgattaccgacgccggcgcgctggagggcggagataacctctcctctacacatcttgatgccgcacaggttcgccaggaagcggcctatcgtggtgtggcgctttataccctgcatctcaaaaccccgagcggtaagaaaaaccatgctgctgccgaggcgcagtatcaggatctgacgctcaacccgttcctgcataaaccgctctactacccgatcgactccggcgatgtgaacaacttcggcaccatggtcgatagcctggcgaacgccatcactggccagatcaaaaccgcctggagcggggaagagacggcgggcagcgcgctgggcgccagcgaagagtatgccggtaagaaagccgacccgctgctgagcgatgcggacaagctgagcaaagcgatgcgccttgcctatctcggtgaaaaacaggggacccaggcaccgccggtgtttaaatcctggattagcgatcgcgatttggtgaaccagaacattcccgccactgaagtgcgtgtcctgctgaccaaaagcgagttgagcgatctgagcgatgtgatgaagaagatcgtcaacgccgccaacgaagggttgatctcgccggacgatatgttcgccagcctgcgttcgctggccgcaacgatgggcaacgatccgaaccaggcgaaaagcaaaaatgccacacgcttaggtgaattgggtctgctgggtgaatacatcgaagggctgccgtacctgagtgaagtgctgagccttgatgaagagacctggaagagctgggatggccttgagcaggagcgatttattcgccgtctcaataccaagctgaactactaccagcgctataaccaggatgttgaccgctggatctcgctggcaccggacagcgatccgcgtgacaacgtctaccctgtgccgctggaaaacctgccgtaa

SEQ ID NO: 1006 - DNA, 786 bp, Kosakonia cowanii
  source 1..786: mol_type = genomic DNA
atgacaacaaaggatctggcgcaaatgggcgccgcgcgggtggtgaagcgggttaacgccgccggaataatggtgattgagaaagcgccggtcagcgaggtcgagtacgccttctaccatcaggttgcgcctgagctaaaccgtgcggaaatccttaccccagccctgctggcagccgatgccagttcgcgcgccctcacccttgaagcgattccctaccctgttagccagcaaaatgttacgtgcgacgccatcgtgtcgatgctggcacggttacaccgcttttcgccggatagccactggcactaccacgcccatcgctggcccgacgcgcaactggagctgagcctgcacctgctcgccttgccggaagaggccgccagagcgctgcgccgctgccagcgcgacagcgacaggctgtttgccgaagcgggcctgatttccggcgacagtaacgccggcaactgggggcagcgcgaaaacggtgagtttgtgctgtttgactgggagcgcttcagcaccggtcacccggcgattgatttagcgccgctgattaaaggcatgggttcgcctgaagagtatcaacgcctcgcggcgcgttactgccgctttaatccgcggtcagaaaatgatctggtacgcgatattgctttagcaaaagcgtggattgtcagcgaagtcattacgctccttcaccagcgacagaaagcggattttccgcgttttcagcactggtatcgctattatttgcccgactggcttaagcagatcgaaaccgttatctga

SEQ ID NO: 1007 - DNA, 786 bp, Kosakonia cowanii
  source 1..786: mol_type = genomic DNA
atgacaacagagaatctggcgcaaatgggcgccgcccgggtggtgaagcgggttaacgccaccggaatagccgtgattgagaaagcgccggtcagcaaggtcgagtacgccttctaccatcaggttgcgcccgagctaaaccgcgcggaaatccttaccccagccttgctggcagccgatgccagcacgcgcgccctcacccttgaagcgattccctaccctgttagccagcaaaatgtcgcgaacgacgctatcgtgtcgatgctggcacggttacaccgctttgcgccggataaaaactggcactatcacccccatcgctggcccgacgcccagctggcgctgagcctgcaactgctcgccttgccggaagaggccgccagagtgctgcgtcgctgccagcgcgagagcgacagactgtttgccgaagcgggcctgatttccggcgacagtaatgctggcaactgggggcagcgcgagaacggcgagtttgtgctgtttgactgggagcggttcagcaccggtcacccggccattgatttagccccgctgattaaaggcatgggcacgcctgaggagtatcgacacctcgcggcgcgctactgccgatttaatccgcggtcggaaaacgatctcgctcgcgatattgccttagcgaaagcgtggattgtcagcgaagtgattacgctccttcacaagcgacagaaagcggattttccgcgttttcagcactggtatcgcagctatttgcccgactggctgagggaagtggaaaaaatgaagtga

SEQ ID NO: 1008 - DNA, 1542 bp, Kosakonia cowanii
  source 1..1542: mol_type = genomic DNA
gtgaaatttaacctgttactgacgctggctgcggccgggttaggcttttcctgcgcggcaaacgcaacgtgggatgagaagttctggaacccaaaacccttggctgatgatgtgatcctgccgctgccctgcgatggcgcaatggcgtttcgtaaggttgctattcctctggataagccgttagccgattacagcattacgcttggcgaagagggcaacgagtggggctatatcgaacagtcacgcccggaccatatcgccggtagcttcccgcaagagaagaaagagaaaggccgttactacctgatggccaaatatgagctgacggatttgcagtatcgcgcactctccggtgattgcgccaaacccgatatcaaaggtcgtctgccgaaggtcaatatcggctggatggacgccatgtcgattgccgataaatacaacctgtggctgcgaaaagagaagccggacgcactgccgcaggatgataagcagccgggctttttacgtctgccgacggaaaccgaatgggagtttgccgcgcgcggcgggctgtctgtctcgtcggcggagtttcgcgatcgccacttcccaatgccggaaggcctgaatggctatgtctggttcgcgggggcgcagtcagcaaataacaaacttcagcttaccggcctgcttaaaccgaacccgctgggtctgcacgatatgctcggcaacgttggcgaaatgatgtttgagccgtttcgcttaaataaacttgaccgcctgcatggcaaagcgggcggctatatcgtgcgcggcggcagctacttaacgccgcaggccgatattcgcagttcgctgcgcggggaagagccctattacaccgcgcaaggtgagaacagcagcaaagcgaacggcatgcgcctggtactggtctcaaccaccctcacctcgcgggatcgcatcaaagagattgaaaaagagtggcaggcgctgggtaccgagagcaaagcggcgaagaaaccgggcgaaggcgcggactcattacagaacctgaatgccatctccgccaaagtgcaggatgagggcgtgaaaaaggagctggagtcgctgcgtaatgaactgcgagccaatagtcagctgcgcgatgagcagcgcgaccaggcgatccgcacctctttgcagttgggcgcctttttgtgcaccaagatgaaagatgacggcgagtttctcgatcgccttaaccagctttatagcaaaacgtgtgccgccgggagccagctggatgccaactgttcgcgtcgccaggagcagctcgatcagcataaaaaagcgctggagtttatcaccagctattacgccgacacgctggtggatatgggcacaacctataacaagagcctgatcgatccgcagatgaccgtcgttcagcaacagatggcggcgcgcggtaaaaccaatctgaatggttacctgaatacctactggggcaaccttcagggctactggaaagatggcaaagtggcgcgagatgcgtggctgagcgcttgtaaaaaaaataattaa

SEQ ID NO: 1009 - DNA, 1953 bp, Kosakonia cowanii
  source 1..1953: mol_type = genomic DNA
atgaaaacgagagtctggctgggcggattcctgtgcttaacggccgccaccatgggcgcgcacgccgccgatcaaaaaccgctgctgcaggaggggaaacatagcctttatcagcgtgttctcacctacccgggctgccagctggcaccgaaagcgggcgaggccggtaaagagcagccggcgtttagccgcttctacgtttatcagcgtagcaagcagggccaggatgagtggttgcaggtggggccggatagcttcggtcatgtttccggctggcttaaagccgcctgtaccgtcgactggaagatgcagctcacgctggcctttaccaacccggcgggtcgccacccgatgctctttttccgcgataagagcgacgtcgaatcgttgctgaataaccctaaaccggccgccgcgctcgatccgttattggccaatctgaagagcaataaacccgtgccgcaggtgctggcgaaagagccggattacatggtcgatcagcagaaaaacttctacctgctgccagtgttaggctctgacgatgtctttaccgacagcggtttccaggtgcgcgtgcttaatgtcgcctcggtcagtgaaaaagcgccggagaaagcggcaaaagcggctgacgagaagaacatgatgaagggcttttcggcgtcggtggtgtttgttatcgactccaccatttcgatgggtccctatatcgaccgcactaaagaggcgatcgataagatctatcagcgcattgaaaaggagcacctccaggatcaggtgaagttcggtctggtggccttccgctctaatgtcaaagccgtgccggggctggagtatgacagcaagatgtatgttgaccccaatacggtgaaagatggcaaagatttcctcgccaaagtacacgatctgaagcaagccacggtctccagcagcaaagtggatgaggatgcttatggcggtgtgatgacggcgcttgataaggtcgactggacgcagtttggcgcacgttacgtgatcctgattaccgacgccggcgcgctggagggcggagataacctctcctctacacatcttgatgccgcacaggttcgccaggaagcggcctatcgtggtgtggcgctttataccctgcatctcaaaaccccgagcggtaagaaaaaccatgctgctgccgaggcgcagtatcaggatctgacgctcaacccgttcctgcataaaccgctctactacccgatcgactccggcgatgtgaacaacttcggcaccatggtcgatagcctggcgaacgccatcactggccagatcaaaaccgcctggagcggggaagagacggcgggcagcgcgctgggcgccagcgaagagtatgccggtaagaaagccgacccgctgctgagcgatgcggacaagctgagcaaagcgatgcgccttgcctatctcggcgagaaacagggaacccaggcaccgccggtgtttaaatcctggatcagcgatcgcgatttggtgaaccagaacattcccgccactgaagtgcgtgtcctgctgaccaaaagcgagttgagcgatctgagcgatgtgatgaagaagatcgtcaacgccgccaacgaagggttgatctcgccggacgatatgttcgccagcctgcgttcgctggccgcaacgatgggcaacgatccgaaccaggcgaaaagcaaaaatgccacacgcttaggtgaattgggtctgctgggtgaatacatcgaagggctgccgtacctgagtgaagtgctgagccttgatgaagagacctggaagagctgggatggccttgagcaggagcgatttattcgccgtctcaataccaagctgaactactaccaacgctataaccaggatgttgaccgctggatctcgttggcaccggacagcgatccgcgtgacaacgtctaccctgtgccgctggaaaacctgccgtaa

SEQ ID NO: 1010 - DNA, 1233 bp, Kosakonia cowanii
  source 1..1233: mol_type = genomic DNA
gtgtcttccagcctgcctgaaacgcgccccaggatggggctactgctaaatatggcgctgcgcgatctgatacacgatcggaaagtggcgctctgtattgtcttctcgctgatcgcggtgatcgccccgctacttctcctgtttggcttaaagaacggtatcgtcagccagctgcgccacgatctgctcgacgatccacgcacgcgggaagtgcggatgaccggcaacggtaactacgatcttgcgtggctcaatgcgctcgcggcacgcccggaggttggcttctcaataccgcttacgcgatcgctgaatacccaggcagacctggtgcgcgacgggcaacattttgccgctggtgcagaggtgatcccttccgcgaaaggcgatccgctgctgcgcgagagcggagtgctgccgcacggcagcacggtggtactaagcaacagcgccgcccgtaagctcgacgtgaaagcgggcgacacgttccggctgtttatcagccgtaaacgcgacgggcagaaccagcgcacatcgctctccgtcagcgtcggtgccattctcgacgaggcgcgctttgcccgccctgcgctatttgtcgacctgcctctgctggtagcgctggaggattatcgcgacggtttccaggtgccgctgctcggcgttaccgacggtgaaaacgcgcgcgagcggcataactttgcgcgggcgcggctctatgccgccacgctggatgatgttgcacccctggcgcaatggcttgagtcgcagcatatcgaagcgataacccaggccgcgcagattgaagcggtgcgcgccatcgatcgcgtgctgggggtgattttcgcggtgatcgcctggatctcggcctcgggctgcattgcgtcgcttattggcgcgtttatcgccaatatcgatcgtaaacgcaaagatatggcagtgctgcgcctgctcggttttcgccgccaggcggtgacgctgttcatcatgatccaggcgctctgcctgacgggcgttgcgtttattgctggcctgttgatttatggcgcgggcagcgcgctgtttaaccaccttctgggcgctaatctccccgaaagcgcttttgtttgtcaccttgatcctggccactttgccgccgccttcctgagcgtgctggccgtggcgctgggcgttgccgcgattggcgcgctgcgggcgttaaagatcgaacctgcggagagtttacgtgaaatttaa

SEQ ID NO: 1011 - DNA, 786 bp, Kosakonia cowanii
  source 1..786: mol_type = genomic DNA
atgacaacagagaatctggcgcaaatgggcgccgcgcgggtggtgaagcggattaacgccgccggaataacggtgattgagaaagcaccggtcagcgaggtcgagtacgccttctaccatcaggttgcgcctgagctaaaccgcgcggaaatccttaccccagccttggtgggatccgatgccagttcgcgcgccctcacccttgaagcgattccctaccctgttagccagcaaaatgtcgcgaacgacgccatcgtgtcgatgctggcgcgcttacaccgctttgcgccggatagcaactggcactaccacacccatcgctggcccgacgaacagctggagctgagcctgcacctgctcgccttaccggaagaggccgccagagcgctgcgccgctgccagcgcgacagcgacaggctgtttgccgaagcgggcccgatttccggcgacagtaacgccggcaactgggggcagcgcgagaacggtgagtttgtgctgtttgactgggagcgcttcagcaccggtcacccggcgattgatttagcgccgctgataaagggcatgggcacgcctgaagagtatcaacgcctcgcggcgcgttactgccgctttaatccgcggtcagaaaacgatctcgcacgcgatattgccttagcgaaagcgtggattgtcagcgaagtaatcacgctccttcaccagcgacagaaagcggattttccgcgttttcagcactggtatcgctgttatttgcccgactggcttaagcagatcgaaaccgttatctga

SEQ ID NO: 1012 - DNA, 786 bp, Kosakonia cowanii
  source 1..786: mol_type = genomic DNA
atgacaacagagaatctggcgcaaatgggcgccgcccgggtggtgaagcgggttaacgccaccggaatagccgtgattgagaaagtgccggtcagcaaggttgagtacgccttctaccaccaggttgcgcccgagctaaaccgcgcggaaatccttaccccagccttgctggcagccgatgccagcacgcgcgccctcacccttgaagcgattccctaccctgttagccagcaaaatgtcgcgaacgacgctatcgtgtcgatgctggcacggttacaccgctttgcgccggataaaaactggcactaccacccccatcgctggcccgacgcgcagctggcgctgagcctgcaactgctcgccttaccgggagaggccgccagagtgctgcgtcgctgccagcgcgagagcgacaggctttttgccgaagcgggcctgatttctggcgacagtaatgctggcaactgggggcagcgcgagaacggcgagtttgtgctgtttgactgggagcggttcagcaccggtcacccggccattgatttagccccgctgattaaaggcatgggcacgcctgaggagtatcgacacctcgcggcgcgctactgccgatttaatccgcggtcggaaaacgatctcgctcgcgatattgccttagcgaaagcgtggattgtcagcgaagtgattacgctccttcacaagcgacagaaagcggattttccgcgttttcagcactggtatcgcagctatttgcccgactggctgagggaagtggaaaaaatgaagtga

SEQ ID NO: 1013 - DNA, 1542 bp, Kosakonia cowanii
  source 1..1542: mol_type = genomic DNA
gtgaaatttaacctgttactgacgctggctgcggccgggttaggcttttcctgcgcggcaaacgcaacgtgggatgagaagttctggaacccaaaacccttggctgatgatgtgatcctgccgctgccctgcgatggcgcgatggcgtttcgtaaggttgctattcctctggataagccgttagccgattacagcattacgcttggcgaagagggcaacgagtggggctatatcgaacagtcacgcccggaccatatcgccggtagcttcccgcaagagaagaaagagaaaggccgttactacctgatggccaaatatgagctgacggatttgcagtatcgcgcactctccggtgattgcgccaaacccgatatcaaaggtcgtctgccgaaggtcaatatcggctggatggacgccatgtcgattgccgataaatacaacctgtggctgcgaaaagagaagccggacgcactgccgcaggatgataagcagccgggctttttacgtctgccgacggaaaccgaatgggagtttgccgcgcgcggcgggctgtctgtctcgtcggcggagtttcgcgatcgccacttcccgatgccggaaggcctgaatggctatgtctggttcgcgggggcgcagtcagcaaataacaaacttcagcttaccggcctgcttaaaccgaacccgctgggtctgcacgatatgctcggcaacgttggcgaaatgatgtttgagccgtttcgcttaaataaacttgaccgcctgcatggcaaagcgggcggctatatcgtgcgcggcggcagctacttaacgccgcaggccgatattcgcagttcgctgcgcggggaagagccctattacaccgcgcaaggtgagaacagcagcaaagcgaacggcatgcgcctggtactggtctcaaccaccctcacctcgcgggatcgcatcaaagagattgaaaaagagtggcaggcgctgggtaccgagagcaaagcggcgaagaaaccgggcgaaggcgcggactcattacagaacctgaatgccatctccgccaaagtgcaggatgagggcgtgaaaaaggagctggagtcgctgcgtaatgaactgcgagccaatagtcagctgcgcgatgagcaacgcgaccaggcgatccgcacctctttgcagttgggcgcctttttgtgcaccaagatgaaagatgacggcgagtttctcgatcgccttaaccagctttatagcaaaacgtgtgccgccgggagccagctggatgccaactgttcgcgtcgccaggagcagctcgatcagcataaaaaagcgctggagtttatcaccagctattacgccgacacgctggtggatatgggcacgacctttaacaagagcctgatcgatccgcagatgaccgtcgtgcagcaacaaatggcggcgcgcggtaaaaccaatctgaatggttacctgaatacctactggggcaaccttcagggctactggaaagatggcaaagtggcgcgcgatgcgtggctgagcgcttgtaaaaaaaataattaa

SEQ ID NO: 1014 - DNA, 1953 bp, Kosakonia cowanii
  source 1..1953: mol_type = genomic DNA
atgaaaacgagagtctggctgggcggattcctgtgcttaacgaccgccaccatgggcgcgcacgccgccgatcaaaaacctctgctgcaggaggggaaacatagcctttatcagcgtgttctcacctacccgggctgccagctggcaccgaaagcgggcgaggccggtaaagagcagccggcgtttagccgcttctacgtttatcagcgcagcaagcagggccaggatgagtggttgcaggtggggccggatagcttcggtcatgtttccggctggcttaaagccgcctgtaccgtcgactggaagatgcagctcacgctggcctttaccaacccggcgggtcgccacccgatgctctttttccgcgataagagcgacgtcgaatcgttgctgaataaccctaaaccggccgccgcgctcgatccgttattggccaatctgaagagcaataaacccgtgccgcaggtgctggcgaaagagccggattacatggtcgatcagcagaaaaacttctacctgctgccagtgttaggctctgacgatgtctttaccgacagcggtttccaggtgcgcgtgcttaatgtcgcctcggtcagtgaaaaagcgccggagaaagcggcaaaagcggctgacgagaagaacatgatgaagggcttttcggcgtcggtggtgtttgtaatcgactccaccatttcgatgggtccctatatcgaccgcactaaagaggcgatcgataagatctatcagcgcattgaaaaggagcacctccaggatcaggtgaagttcggtctggtggccttccgctctaatgtcaaagccgtgccggggctggagtatgacagcaagatgtatgttgaccccaatacggtgaaagatggcaaagatttcctcgccaaagtacacgatctcaagcaagccacggtctccagcagcaaagtggatgaggatgcttatggcggtgtgatgacggcgcttgataaggtcgactggacgcagtttggcgcacgttacgtgatcctgattaccgacgccggcgcgctggagggcggagataacctctcctctacacatcttgatgccgcacaggttcgccaggaagcggcctatcgtggtgtggcgctttataccctgcatctcaaaaccccgagcggtaagaaaaaccatgctgctgccgaggcgcagtatcaggatctgacgctcaacccgttcctgcataaaccgctctactacccgatcgactccggcgatgtgaacaacttcggcaccatggtcgatagcctggcgaacgccatcactggccagatcaaaaccgcctggagcggcgaagagacggcgggcagcgcgctgggcgccagcgaagagtatgccggtaagaaagccgacccgctgctgagcgatgcggacaagctgagcaaagcgatgcgccttgcctatctcggtgaaaaacaggggacccaggcaccgccggtgtttaaatcctggatcagcgatcgcgatttggtgaaccagaacattcccgccactgaagtgcgtgtcctgctgaccaaaagcgagttgagcgatctgagcgatgtgatgaagaagatcgtcaacgccgccaacgaagggttgatctcgccggacgatatgttcgccagcctgcgttcgctggccgcaacgatgggcaacgatccgaaccaggcgaaaagcaaaaatgccacacgcttaggtgaattgggtctgctgggtgaatacatcgaagggctgccgtacctgagtgaagtgctgagccttgatgaagagacctggaagagctgggatggccttgagcaggagcgatttattcgccgtctcaataccaagctgaactactaccaacgctataaccaggatgttgaccgctggatctcgctggcaccggacagcgatccgcgtgacaacgtctaccctgtgccgctggaaaacctgccgtaa

SEQ ID NO: 1015 - DNA, 1407 bp, Kosakonia cowanii
  source 1..1407: mol_type = genomic DNA
gtgaaagagatgtttctgtgcagtgacaagctcaataaatatcagtcgatgggcgaaaacgggcaggctgtccatatttctgcgctgcagttgcgcgaaacccttcgcctgcgcaaacagagcgcggcggcagatgtgctcgccattccgcaaatcagtgaacacggcgaacgggttgactggtatgcccctttttccggcgacgtcattccctggtcagcggccacggagagcgaacgtcaaagcgccttagcgcagctggaaatcacgcaggcaacgttgcgccagctcagccaggatttcgcccagagcaatcagccggagcagcagctgtttggtaagctgctggaaaaaaccctgcaatttcccgatcccgagcatgtctggctggtcaacggcaagccggtgatcagcttctggggattcgtcaacgcccgccatcaggcacggatcgatccgctggactgcttacgtccgccgaaacccgttacgcccgcagccccactgcacagcgcgccgccggtcaacgaaccgctggtgacgcagccgaagcgtcgcggatggtggatcctgcccgcgtggttatgctggctgctaccgttactgctgttagctcttctgctgctgtggctgctgcgcggctgcgtacccggcgtcaccattcctggctttagcgttgagaaaccggcgcttcctgacgtgcatcttccggttgcggagaatggcgccaccctgcccgtcacctcctctgaacgtattgttggcaccaccgaaggcgttactgcgccagtggtgagcggcagcacgacgggcatcgtcccgttgagtgatgaagagcgtgccacagctgccccggaaaacgccgccgcccttaacgatcccgccgtgccggtcgcgcctgaaacaggcagcgagcctgcgcaagctggcgttgagcccgtgacgccagaggcgcaggtgaacgacccggcgctggcggaacccaacgctactgcgggcaacgctaccgcgccggtggaggtgaaaaacccgttaagcctgccgccggaagcgctggcgcaggggcgtaccgatttcctcaatggccaatggcgcgcaggcgcaggcatccaggatcagcgtaccggcaagccgctgagcctcaactaccagattaaagatggcaaaggtgaagtgcagatggtgcgcggcgatggcgtctcctgccgcggtgcggtcaatgccgccatccaggccggcaagctggccattaataaccagggtgaagcgcaatgtaccgatggctcggtttaccagatgccggagatcgtctgtgcgcccggtgctaagagcgttgccgactgtaaaggcagctacggcaccagtacccttttccccctttcgatgaagcaggaggcaagtaactaa

SEQ ID NO: 1016 - DNA, 3003 bp, Kosakonia cowanii
  source 1..3003: mol_type = genomic DNA
atgctggctgagctcactgattttaaaaaacaggtcaaacttatccgtgacagcgggattcagttcctcgacttcgctttctccctgcccgcgcgtaaagcctacggcgaatttctgcgccagcagggcgaaggtgcggtgctgcgccttatctacaacgagcgtgacgacaagtttcaggtcccgacgccagacggcgaaacgccgcgcaacgccgaaccggagtatgcgctggcgattgaagattccctgagcctttatgcagggatctggttgccgctgcccttctttcgcttcaacccgccgggcggcttttctcacgggccgactaactggtcgcgcgtgcagtttcatcaactgccggagccggacgagaaaggcaacacctggcgtgcaacgctgattttcgataccaaaatctttcccgaccgcgaacatacacaatacctggcacccggcgaagatgatgtccgttccggggccggttttgcgctggcctgcttaccacaccagatgggcgacttcctgactcttccatggattgaggagtggctgaacgatatctataccaggcaggcacacgctgtgctgcgtcagcaccccgaagacaccgaagagaagctggggctgaaagagcatcaggcgcacttccttaacctgctcgaggtgctgaaaaagaccatcgccattccagaagtacagctcaatgacgtgaaaattcgtgataccgcgatccccgtcgacctggtgctggatattggcaactcacgcagctgcggcgtgctgattgaggagcatgcggcggataacaaaggcctctcccagctttatcagctgcaattgcgcgatctgagccagccgcagtttgtctataacgagccgtttgagagccgactggagttcgcgcaggcggagtttggcaagcaggacttctcatcgaaaagcgggcgcagcgacgcctttacctggccgaccatcggccgcgtcggcggtgaggctttccgcatggcggcgcagcgtttaggtaccgaaggctcaaccggcctctccagcccgaaacgctatctgtgggacgatcagccctactctccgggctggcgtttcagccaggcgtttgtcaaatcggatcgtgaaccgctggcgaccgccgccccgctgctctatatgctcaatgatcatggcaagctgttgattcgcctcaatgaagatgagcggatgccggtcttctcgcctgtttacagccgcagttcattgatgaccatgatgctctcagaagtgctgagccaggcgttaatgcagatcaacagcccggcgcagcgcctgaagatgagccacgccagccatccacgtcgtttacgcaacgtgatcctgaccgtgccgccggcgatgccgaaaccagagcgcgccatctttgaagcctgcatgcatgacgctatccgcctggtgtggaaatcgcttgagtgggaagagatggattacgacggcgaagagagcggcaatgcgaagcagccgcaccccggcgttcatgtgaagtgggatgaagcgacctgcggacagctggtctatctctataacgaaacgcagaccaattttggtggccgcaccgatgagttttttgccgccacccgtcgccccgataatcagcaggcggagggggaacaacgcagcctgaagatcgcctccatcgacattggcggtggcaccaccgatctggtgatcacccgctatacgctggatgacggtaaaggcattaacgtgcgcattacaccgaaacagctcttccgcgaaggctttaaagtggcgggcgacgacattctgctggatgtcatccgtctctatctccagccagccgtaaaagcggcgatgatgaaagtcggccacagcgatatcgcggcagagtcgatgatgtcgcagctgttcggcagtgaagcgatcgaagcgggcaagcaggtgctgcgccagcagttgacgctgcaaatcttctcaccgctggcgctggccattcttcatcgctatgaagagtacaagccggagagtggccgcgaagtcctcaactataccttccgcgaactgctcaccggcactacgcctaccgccaaagtgcaggattacgttaacgacgtggtgcgcaccggccagttggcgagcgaagcgctcttctcactgctcgatgtgccgttagaggtcgatctcgcccgtctgcataatgagtttatcgatccgcgcagcggccggatgaacatctgccatagcctgcgcgccctgtgtgaagtgctctggcactacaattgtgatgtgctgctgttaacgggccgcccttcacgcctgccgggcatccaggcgctgattcgccagctccagccggtgccgccgacgcgggttctgccgctgcacgggtatgaaaccggcggctggtatcccttcaacaaaaaagggtgcattgacgatccgaaatccaccgcggtggtcggcgcgatgctctgcctgctggcggagaagtcgcgtctcaacaacttctatttccgcgcggcaaactttaccgcctactcgacgatccgctacctcggcatgctggatggcaacaacgtcatcaaagacagcaacgtcttttacagcgatatcgacctcgatgccgctgacttccagctccctcagggccagccatttgaggcgcgcggtgaagtgcgtatcggtttccgccagctggataacgagcgctggccggcctcgtcgctttataccctgaaaatcaacaatccgaaccttgccagcgaactcgccggcgatgcggtgatgcgtattgagctgatggcggaacagggccgcgcgcgaaacggcgaagaggcggtcagcccggagcgtttccgtattgagtcgctggagatggagaacgccagacgaaactacagccgcaaggacgtgaccttccagttaaacacgatggttggcaatggcatgggcgaaagccagtactggctggatagcgggagcattaagagctaa

SEQ ID NO: 1017 - DNA, 2667 bp, Kosakonia cowanii
  source 1..2667: mol_type = genomic DNA
atgaacagcatcaattcgaagcaaattatccagggctggcagggcgttgaacgcggtgccggtgaagcgattgagtggatcaacgcggtgcgccaggatgcgccgcgtcttaataccgaagccgaccgtctgacgattaacctccgccgcagccgtaacaaggcgcgccgtctggcgctggcagcagcaaaaccgatgaccatcggcttctttggcctgtcgcaggcgggcaaatcctacctgatttccgcactggcggcgggtgaaaacggcaagctggagacccgcctcggcggtaagcagctcgattttctgacccacatcaacccgccgggcggcggcaaagaggcaaccggcctggtgacgcgctttagccgccgtcaggttggcggcgacgagcgctggccggtgacgctgcaactgtttagcgaaatcgagatgggcaaaattctcgccaacgcctttatccatgattttaatcaggaaaaattcgactggcagtatgacgaagggcgcatcagcgatctgttgaattcgctggccaaacgccgtcgcccaacccgcgtggcgggcatcagtgaagatgatgtcgtctcgctgtgggattacctgagccgccatgcagaaaaaagccagagccgcttagcgctgcactactggccgcaggcgattacgctggcaccgtggttgacgccggaggatcgcggtcagctcttctcggtgttatggggcgaggtggcagagctgaccgaagcttatatccgtttcgcgcaaaccctgcatcggctgggcggcgcgcaggaagtgtgggcgccgttaagcacgctggtcagcgaagagaatggcctgctggtgcagcgcgacagcattatgaatgtcgacatgctggagcggctgaataaagagaccgatatccgcattgaggtttgtccggtggtggagggccaggccgcagcgcccgtcaccctctcgctggcagaattaacggcattaaccgttgagttgcatattccgctggtcgcctcgacccgcgagccgctgtttgagaccgtcgatctgctcgatttccccggttatcgcgggcgcctcggcgttgagtcgatggatgatattcgccgcgcggtcaacagtgaagagagcaacccgctggcgcagctgattttacgtggcaaagtcgcttatctctttgagcgctataccgaaaaccaggagatgaacgtcctggtggtctgtacggcttccaccaagcagtcggatgttaaagaggtgggcggcgtgctcgatgagtggatccgctacacccagggcgctgacgccgaggcgcgcggccgccgtctgccggggctaatttgggcgctgaccatgttcgatctgcgcatcagccaggggctgtcgcaagaggaggcaatcctgcgacaatcctgggggctgggcgggatgatcaaaatggcaatgaccgagcgcttcggtcagtacaaatggatgcaggagtggcagcgcggacaggcgtttaacaacaccttccttgtgcgcaagccgcgccagcagacgccgtttattcgtattagcgacggtaacgaagcggcgtttagcgaagagaacctgccgcagctccagctaatgcgcaaaaccttccttgaagatgaagcggttaaccgctatatcgcctcgccggatgaagcctgggacgcgatgctcgagcttaacgacggcgggatgcgccgcatggctgattacctctcgaccgttgcgcgaccggaagtgaagctcgagcgcattgccgagcagttgcaggagatccgcgatgagctgatcgagggcggtttaggcaactggtatcagccagacggcgaagaggatgcggcgaaaaaggcgcagattgcccgcgacattctggatgtgctgaaaaaacgcagcggtatgcacggcgagctattgctgcgcctggtgccgacgcgccgcgatttgcaggcactctatctgcaacaaaccacactgccggtgcaggaagaggcgcctgaagagctggatattttcgatatcggcgtcggcgctgcctttggggctgaagcacctgcggcaacgacctatagccacgaaattgccttcgcgcatcagagcgtgcagcactggatcaaccatctacgcggcttgtcggaaagcccggcgttgctcaactacatcaatttaccgcgcccgattatcgacgcgctggccgatgaactgattaccgccctgctccgtctgcgcgtcgaagagaagctcgttgaggcgatgaccaataccgagcaggcaggcgtgctgctggagcagatggtggaccgtcaggtgtcgcgcatcctgcatgtgatgggcgattttattacctggcttgggtacctcgagatgcccgcagcgaaacgcccgacacgcttgaatatgccggatcagcacattttcacccgcccctctcagtgcgacagcgtggtgtggaaagacgacgagcgcctggcgcgtttaacgccgcaacaactgaactacaccgccatgttcattatcgactggctggtgggactggagtcgctgattaccgagaacgcgggccattcggccggtcgggagatcagcgtggcgcagaacgaaaaactgggcgccatcatccgtcagattcagacttcacaggagtaa

SEQ ID NO: 1018 - DNA, 1098 bp, Kosakonia cowanii
  source 1..1098: mol_type = genomic DNA
ttgaagatatggctgaacggcgagcgggtgacgaaagtcaatcttaccggcgacacgatggttatcacctggacgccgcgcgacagagccaccggcgcgcccctgcaaaaaacaccggcacagcggcagatagaaagtcatttcccggagctggccagcggtatgcacctgccaaagtttgcgcgggtgatggccgcgagtgaaccggccagcagcgggaattttgccgatccgttccggccacgttatgccgtcgatgtgcagctgcttgacgcagacggcaagcccgacagcggtacgccggtttattctgccgtgccgctgcccgtgccaatggccgggaatgattcgggcatgttccagtttccgcccgaagggacgctggttgaggtggcattcaccggcggcagaccggataagccctttgtgcgccagaccgtgccggaaggcacaagtctgccggacgtgaagccgggcgaacagctgcaacagcagcgcgccgaggtatcacagcgggtgacgcagggcggtgactgggagcgacagacggatcagtcaatccgcgaaacatccatgtcacgccacgttcaggccgatactgaaacccgcgaaatggtgacgcgtgataccaccattaaagccacggacaaaaccaccgtgctgggaacggccaccctgatggccgggcatatccagcatgtgaccagcggcgattatgcgatggccaccggcgggaaatacgtggcgagtgtggcaggcgatgctgaaacggagatcgccgggaaacagtcaacgaaagtgaccggcggtatcagcattgaaaccagcggcgcactgactgaaaagattgccgcgcagcgcaaatccgtggccgctggcggtcagcaactgatggggacaaccgtgcatatcggcagcgaaagcattaatgcgctgaccatgatgctggacaccattgatttgctgtcagagctggcgcagcagtgtgccagccatacccaccccggcaccggtgccccggccagtgccagcgcctttacgcaggtggccgcaagggcagggcagacccgcagcaaataccagaagctaatcgcctga

SEQ ID NO: 1019 - DNA, 1281 bp, Kosakonia cowanii
  source 1..1281: mol_type = genomic DNA
atgataagaataacaaggatcgttaaaccgtcagttgaattaaccgattatgccacgtcattttcgccttttcgtacgctcctcgaaacctatttacccgcctctatccaaaatttatatgcccgcccggttatcgccgatgatggtgccgttgagtggtatagcgatattaatggtcagccgcgtcgcttactcgatttgagtgaaaccgagcagagccgcgcccgcgccgtgctggaacagcgtctcgacagcgttcgggcactgcatcagaagctggcgcaaagcgggagcgaaccagaaacaatgctgcgcctgctacaggcggccagtcactctcctgcacctgagcaggtgtgggtaattgacggtcacccggtgattgttccgcctgcggagggcacgccccatgccgctgctgccgcaaccactgccgctgccgtctcaagccgtcgctggtggccatggcttttacttctggcactgcttatcgccctgattctgttgctgttgtcacgctgttcgccactgcatgaaacagcagcacccgtcacgcccgcgccaccagctgtaacgcccggcgagccggtgaaacctgaaacggcacccgcgccgcaagcgccggtaaaacccaccaaagcggtctgcccggcgcagcgaacccaacagcaagcccctgaaatggtggtgattatggacgcctccggttcgatggccatcaccatggatgccacgcaggatgagttgatcagctggaaccaggggaaatatgtcgagaatatcgaacgtgaaccgcgccgtatctcgctggcgcgtaacgcggccaaaggcattattgacactatcccgcgcgatatgaacatcagcctggtggcggcggaaaactgccgtcaggtctccctgtcgcccagcttcccctttgcccagcgatcggcgctgaaaaagcggattgaaggtattcaaccggtcggtaaaacgcctctcgccgaagccttagcgctggcgggcaaaaaggtggatggcgtgaaccgcgatgcgatcattttgctggtctctgacggagatgaaacctgcggcggcgatccctgccaggttgcccgcgagctgaaaaagagtaaaccgcgcctgcaggtgaatgtcgttgatattatgagcaccggcgcaggaaattgtattgccagcagcaccggcggcaaagtttttgctgtaaacaatacccgggaatttaagcagatcatgaaaaaggcgatgcaagaatatattcctgagggctgcgaataa

SEQ ID NO: 1020 - DNA, 1407 bp, Kosakonia cowanii
  source 1..1407: mol_type = genomic DNA
gtgaaagagatgtttctgtgcagtgacaagctcaataaatatcagtcgatgggcgaaaacgggcaggctgtccatatttctgcgctgcagttgcgcgaaacgcttcgcctgcgcaaacagggcgcggcggccgatgtgctcgccattccgcaaattagtgaacacggcgaacgtattgactggtatgccccttttcccggcgatgtcattccctggtcagcggccacggagagcgaacgtcaaagcgccctggcgcagctggaaaccacgcaggccacgttgcgccagctcagccaggatttcgcccagagcaaccagccggagcagcagctgtttggtaagttgctggaaaaaaccctgcaatttcccgatcccgagcatgtctggctggtcaacggcaagccggtgatcagcttctggggattcgtcaacgcccgccatcaggcacggatcgatccgctggattgcttacgtccgccgaaacccgttacgcccgcggccccgcagcacagcgcgccgccgatcaacgagccggtggtaacgccgccgaagcgtcgcggatggtggatcctgcccgcgtggttatgttggctgttaccgctgcttcttttagcacttctgctgctgtggctgctgcgcggctgcgtacccggcgtaactattcctggctttagcgttgagcaaccggcactgcctgatgcgcaccttccggttgcggagaatggcgccaccctgcccgtcacctcctctgaacgtgttgttggcactaccgagggcgtgactgcgccagtggtgagcggcagcacgacgggcatcggcccgttgagtgatgaagagcgcgccacagctaccccggaaaacgccgccgcccttaacgatcccgccgtgccggtcgcgcctgaaacaggcagcgagcctgcgcaagctggcgttgagcccgtgacgccagaggcgcaggtgaacgacccggcgctggcggaacccaacgctaccgcgggcaatgctaccgcgccggtggaggtgaaaaacccgttaagcctgccgccggaagcgctggcgcaggggcgtaccgatttcctcaatggccaatggcgcgcaggcgcaggcatccaggatcagcgtaccggcaagccgctgagcctcaactaccagattaaagatggcaaaggtgaagtgcagatggtgcgcggcgatggcgtctcctgccgcggcgcggtcaatgccgccatccaggccggcaagctggccattaataaccagggtgaagcgcaatgtaccgatggctcggtttaccagatgccggagatcgtctgtgcgcccggtgctaagagcgttgccgactgtaaaggcagctacggcaccagtacccttttccccctttcgatgaagcaggaggcaagtaactaa

SEQ ID NO: 1021 - DNA, 3003 bp, Kosakonia cowanii
  source 1..3003: mol_type = genomic DNA
atgctggctgagctcactgattttaaaaaacaggtcaaacttatccgtgacagcgggattcagttcctcgacttcgctttctccctgcccgcgcgtaaagcctacggcgagtttctgcgccagcagggcgaaggtgcggtgctgcgccttatctacaacgagcgtgacgacaagtttcaggtcccgacgccagacggcgaaacgccacgcaacgccgagccggagtatgcgctggcgattgaagattccctgagcctttatgcagggatctggttgccgctgcccttctttcgcttcaacccaccgggcggcttttctcacgggccgactaactggtcgcgcgtgcagtttcatcaactgccggagccggatgagaaaggcaacacctggcgtgcaacgctgattttcgataccaaaatctttcccgaccgcgaacatacacaatacctggcacccggcgaagatgatgtccgttccggggccggttttgcgctggcctgcttaccgcaccagatgggcgacttcctgactcttccatggattgaggagtggctgaacgatatctataccaggcaggcacacgctgtgctgcgtcagcaccctgaagacaccgaagagaagctggggctgaaagagcatcaggcgcacttccttaacctgctcgaggtgctgaaaaagaccatcgccattccagaagtacagctcaatgacgtgaaaattcgtgataccgcgatccccgtcgacctggtgctggatattggcaactcacgcagctgcggcgtgctaattgaggagcatgcggcggataacaaaggcctctcccagctttatcagctgcaattgcgcgatctgagccagccgcagtttgtctataacgagccatttgagagccgactggagttcgcgcaggcggagtttggcaagcaggacttctcgtcgaaaagtgggcgcagcgacgcctttacctggccgacgatcggccgtgtcggcggtgaggctttccgcatggcggcgcagcgtttaggcaccgaaggctcaaccggcctctccagcccgaaacgctatctgtgggacgatcagccctactctccgggctggcgtttcagccaggcgtttgtcaaatcggatcgtgaaccgctggcaaccgccgcaccgctgctctatatgctcaacgatcatggcaagctgttgattcgcctcaatgaagatgagcggatgccggtcttctcgccggtttacagccgcagttcattgatgaccatgatgctctcagaagtgctgagccaggcgttaatgcagatcaacagcccggcgcagcgcctgaagatgagccacgccagccatccgcgtcgtttacgcaacgtgatcctgaccgtaccgccggcgatgccgaaaccagagcgcgccatttttgaagcctgcatgcatgacgctatccgcctggtgtggaaatcgctggagtgggaagagatggattacgacggcgaagagagcggcaatgcgaagcagccgcaccccggcgttcatgtgaagtgggatgaagcgacctgcggacagctggtctatctctataacgaaacgcagaccaatttcggtggccgcaccgatgagttttttgccgccacccgtcgccccgataatcagcaggcggaaggggaacagcgcagcctgaagatcgcctccatcgacattggcggcggcaccaccgatctggtgatcacccgctatacgctggatgacggtaaaggcattaacgtgcgtattacaccgaaacagctcttccgtgaaggcttcaaagtggcgggcgacgacattctgctggatgtcatccgtctctatctccagccagccgtaaaagcggcgatgatgaaagtcggccacagcgatatcgcggcagagtcgatgatgtcgcagctgttcggcagcgaagcgatcgaagcgggcaagcaggtgctgcgccagcagttgacgctgcaaatcttctcgccgctggcgctggccattcttcatcgatatgaagagtacaagccggagagtggccgcgaagtcctcaactataccttccgcgaactgctcaccggcactacacctaccgccaaagtgcaggattacgttaacgacgtggtgcgcaccggccaactggcgaatgaagcgcccttctcactgctcgatgtgccgttagaggtcgatctcgcccgtctgcataatgagtttatcgatccacgcagcggccggatgaacatctgccatagcctgcgcgccctgtgtgaagtgctctggcactacaactgcgatgtgctgctgttaacgggacgcccttcacgcctgccgggcatccaggcgctgattcgccagctccagccggtgccgccgacgcgggttctgccgctgcacggatatgaaaccggcggctggtatcccttcaacaaaaaagggtgcattgacgatccgaaatccaccgcggtggtcggcgcgatgctctgcctgctggcggagaagtcgcgtctcaacaacttctatttccgcgcggcaaactttaccgcctactcgacgatccgctacctcggcatgctggatggcaacaacgtcatcaaagacagcaacgtcttttacagcgatatcgacctcgatgccgctgacttccagctccctcagggcctgccatttgaggcgcgcggtgaagtgcgtatcggtttccgccagctggataacgagcggtggccggcctcgtcgctctataccctgaaaatcaacaatccgaaccttgccagcgaacttgccggcgatgcggtgatgcgtattgagctgatggcggaacagggccgcgcgcgaaacggcgaagaggctgtgagcccggagcgtttccgtattgaatcgctggagatggagaacgccagacgaaactacagccgcaaggatgtgaccttccagttaaacacgatggttggcaatggcatgggcgaaagccagtactggctggatagcgggagcattaagagctaa

SEQ ID NO: 1022 - DNA, 2667 bp, Kosakonia cowanii
  source 1..2667: mol_type = genomic DNA
atgaacagcatcaattcgaagcaaattatccagggctggcagggcgttgaacgcggtgccggtgaagcgattgagtggatcaatgcggtgcgccaggatgcgccgcgtcttaataccgaagccgaccgtctgacgattaacctccgccgcagccgtaacaaggcgcgccgtctggcgctggcagcggctaaaccgatgaccatcggcttctttggcctgtcgcaggcgggcaaatcctacctgatttccgcgctggcggcgggtgaaaacggcaagctggagacccgcctcggcggtaaacagctcgattttctgacccacatcaacccgccgggcggcggcaaagaggcaaccggcctggtgacgcgctttagccgccgtcaggttggcggcgacgaacgctggccggtgacgctgcaactgtttagcgaaatcgagatgggcaaaattctcgccaacgcctttatccatgattttaatcaggaaaaatttgactggcagtatgacgaagggcgcatcaacgatctgctggcctcgctgaccaaacgacgtcgcccaacccgcgtggcgggcatcagtgaagatgatgtcgtctcgctgtgggattacctgagccgccatgcggaaaaaagccagagccgcttagcgctgcactactggccgcaggcgattacgctggcgccgtggctgacgccggaggatcgcggccagctcttctccgtgttatggggcgaggtggcagagctgaccgaagcctatatccgttttgcgcaaaccctgcatcggctgggcggcgcgcaggaagtgtgggcaccgttaagcacgctggtcagcgaagagaatggcctgctggtgcagcgcgacagcattatgaatgtcgacatgctggagcggctgaataaagagaccgatatccgcattgaggtctgcccggtggtggaaggccaggccgcagcgtccgtcaccctgtcgctggcagaattaacggcattaaccgttgagttgcatatcccgctggtcgcctcgacccgcgagccgctgtttgaaaccgtcgatctgctcgattttcccggttatcgcggacgcctcggcgttgagtcgatggatgacattcgccgcgcggttaatagcgaagagagcaacccgctggcgcagctgattttacgtggcaaagtcgcttatctctttgagcgctataccgaaaaccaggagatgaacgtcctggtggtctgtacagcctcgaccaagcagtcggatgtgaaagaggtgggcggcgtgctcgatgagtggatccgctacacccagggcgccgacgccgaggcgcgcggccgccgtctgccagggttaatttgggcgctgaccatgttcgatctgcgcatcagccaggggctgtcgcaagaggaggcaatcctgcgacaatcctgggggctgggcgggatgatcaaaatggcgatgaccgagcgtttcggtcagtacaaatggatgcaggagtggcagcgcggacaggcgtttaacaacaccttcctcgtgcgcaagccgcgccagcagacgccgtttattcgtattagcgacggtaacgaagcggcgtttagcgaagagaaccttccgcagttacagctgatgcgcaaaaccttcctcgaagatgaagcggtcaatcgctatatcgcctcgccggacgaagcctgggacgccatgctcgagcttaacgacggcgggatgcgccgcatggctgattacctctcaaccgttgcgcgcccggaagtgaagcttgagcgcatcgccgagcagttgcaggagatccgcgatgagctgatcgagggcgggttaggcaactggtatcagccagacggcgaagaggatgcggcgaaaaaggcgcagattgcccgcgacattctggatgtgctgaaaaaacgcagcggtatgcacggcgagctgttgctgcgcctggtgccgacgcgccgcgatttgcaggcactctatctgcaacaaaccacactgccggtgcaggaagagacgcctgaagagctggatatcttcgatatcggtgttggcgctgcctttggggctgaagcacctgcggcaacgacctatagccacgaaattgccttcgcgcatcagagcgtacagcactggatcaaccatctgcgtggcttgtcggaaagcccggcgttgctcaactacatcaatttaccgcgcccgattatcgacgcgctggccgatgaactgattaccgccctgctccgtctgcgcatcgaagagaagctcgttgaggtgatgaccaataccgagcaggcaggcgtgctgctggagcagatggtggaccgccaggtgtcgcgcatcctgcatgtgatgggcgattttattacctggcttggatacctcgagatgcccgcagcgaaacgcccgacacgcttgaatatgccggagcagcacattttcacccgcccctctcagtgcgacagcgtggtgtggaaagatgacgagcgtctggcgcgtttaacgccgcaacaactgaactacaccgccatgttcattatcgactggctggtgggactggagtcgctgattaccgagaatgcgggccactcggccggtcgggagatcagcgtggcgcagaacgaaaaactgggcgccatcatccgtcagattcagacttcacaggagtaa

SEQ ID NO: 1023 - DNA, 1281 bp, Kosakonia cowanii
  source 1..1281: mol_type = genomic DNA
atgataagaataacaaggatcgttaaaccttcagttgaattaaccgattatgccgcgtcattttcgccttttcgtacgctcctcgaaacctatttacccgcctctatccaaaatttatatgcccgcccggttatcgccgatgatggtgccgttgagtggtatagcgatattaatggtcagccgcgccgcttactcgatctgagtgaaaccgagcagagccgcgcccgcgcggtgctggaacagcgtctcgacagcgttcgggccctgcatcagaagctggcgcaaagcgggagcgagccagaaacaatgctgcgcctgctacaggcggccacccactctcctgcacctgagcaggtgtgggtgatcgacggccatccggtcatcgtcccacctgcggagggcgcgccccgcgccgctgctgccgccgccactgccgctgccgtctcaaggcgtcgctggtggccgtggcttttacttctggcactgcttatcgccctgattctgttgctgctgtcacgctgttcgccactgcacgaaacagcagcacccgtcacgcccgtgccaccagctgtaacgcccggcgagccggtgaaacctgaaacgacacccgccccgcacgcgccggtaaaacccaccaaagcggtctgcccggcgcagcgaacccaacagcaagcccctgaaatggtggtaattatggacgcctccggttcgatggctatcaccatggatgccacgcaggatgagttgatcagctggaaccaggggaaatatgtcgagaatatcgaacgtgaaccgcgccgtatctcgctggcgcgaaacgcggccaaaggcattattgacactatcccgcgcgatatgaacatcagcctggtggcggcggaaaactgccgtcaggtctccctgtcgcccagcttcccgtttgcccagcgatcggcgctgaaaaagcggattgaaggtattcaaccggtcggtaaaacgcctctcgccgaagccttagcactggcgggcaaaaaagtggatggggttaaccgcgatgcgattattttgctggtttccgacggagatgaaacctgcggcggcgatccctgtcaggttgcccgcgagctgaaaaagagtaaaccgcgcctgcaggtgaatgtcgtcgatattatgagcaccggtgcaggaaattgtattgccagcagcaccggcggcaaagtttttgccgtcaacaatacccgggaatttaagcagatcatgaaaaaggcgatgcaagaatatattcctgagggctgcgaataa

SEQ ID NO: 1024 - DNA, 1281 bp, Kosakonia cowanii
  source 1..1281: mol_type = genomic DNA
atgataagaataacaaggatcgttaaaccttcagttgaattaaccgattatgccgcgtcattttcgccttttcgtacgctcctcgaaacctatttacccgcctctatccaaaatttatatgcccgcccggttatcgccgatgatggtgccgttgagtggtatagcgatattaatggtcagccgcgccgcttactcgatctgagtgaaaccgagcagagccgcgcccgcgcggtgctggaacagcgtctcgacagcgttcgggccctgcatcagaagctggcgcaaagcgggagcgagccagaaacaatgctgcgcctgctacaggcggccacccactctcctgcacctgagcaggtgtgggtgatcgacggccatccggtcatcgtcccacctgcggagggcgccccccgcgccgctgctgccgccaccactgccgctgccgtctcaagccgtcgctggtggccgtggcttttacttctggcactgcttatcgccctgattctgttgctgctgtcacgctgttcgccactgcacgaaacagcagcacccgtcacgcccgcgccaccagctgtaacgcccggcgagccggtgaaacctgaaaagacacccgccccgcacgcgccggtaaaacccaccaaagcggtctgcccggcgcagcgaacccaacagcaagcccctgaaatggttgtgattatggacgcctccggttcgatggccatcaccatggatgccacgcaggatgagttgatcagctggaaccaggggaaatatgtcgagaatatcgaacgtgaaccgcgccgtatctcgctggcgcgtaacgcggccaaaggcattattgacactatcccgcgcgatatgaacatcagcctggtggcggcggaaaactgccgtcaggtctccctgtcgcccagcttcccgtttgcccagcgatcggcgctgaaaaagcgcattgaaggtattcaaccggtcggtaaaacgcctctcgccgaagccttagcactgtcgggcaaaaaagtggatggggttaaccgcgatgcgattattttgctggtttccgacggagatgaaacctgcggcggcgatccctgccaggttgcccgcgagctgaaaaagagtaaaccgcgcctgcaggtgaatgtcgtcgatattatgagcaccggtgcaggaaattgtattgccagcagcaccggcggcaaagtttttgccgtcaacaatacccgggaatttaagcagatcatgaaaaaggcgatgcaagaatatattcctgagggctgcgaataa

SEQ ID NO: 1025 - DNA, 1281 bp, Kosakonia cowanii
  source 1..1281: mol_type = genomic DNA
atgataagaataacaaggatcgttaaaccttcagttgaattaaccgattatgccgcgtcattttcgccttttcgtacgctcctcgaaacctatttacccgcctctatccaaaatttatatgcccgcccggttatcgccgatgatggtgccgttgagtggtatagcgatattaatggtcagccgcgccgcttactcgatctgagtgaaaccgagcagagccgcgcccgcaccgtgctggaacagcgtctcgacagcgttcgggcactgcatcagaagctggcgcaaaacgggagcgagccagaaacaatgctgcgcctgctacaggcggccacccactctcctgcacctgagcaggtgtgggtgatcgacggccatccggtcatcgtcccacctgcggagggcgcgccccgcgccgctgctgccgcaaccactgctgctgccgtctcaaggcgtcgctggtggccgtggcttttacttctggcactgcttatcgccctgattctgttgctgctgtcacgctgttcgccactgcacgaaacagcagcacccgtcacgcccgtgccaccagctgtaacgcccggcgagccggtgaaacctgaaacgacacccgccccgcacgcgccggtaaaacccaccaaagcggtctgcccggcgcagcgaacccaacagcaagcccctgaaatggtggtaattatggacgcctccggttcgatggctatcaccatggatgccacgcaggatgagttgatcagctggaaccaggggaaatatgtcgagaatatcgaacgtgaaccgcgccgtatctcgctggcgcgtaacgcggccaaaggcattattgacactatcccgcgcgatatgaacattagcctggtggcggcggaaaactgccgtcaggtctccctgtcgcccagcttcccgtttgcccagcgatcggcgctgaaaaagcggattgaaggtattcaaccggtcggtaaaacgcctctcgccgaagccttagcactggcgggcaaaaaagtggatggggttaaccgcgatgcgattattttgctggtttccgacggagatgaaacctgcggcggcgatccctgccaggttgcccgcgagctgaaaaagagtaaaccgcgcctgcaggtgaatgtcgtcgatattatgagcaccggtgcaggaaattgtattgccagcagcaccggcggcaaagtttttgccgtcaacaatacccgggaatttaagcagatcatgaaaaaggcgatgcaagaatatattcctgagggctgcgaataa

SEQ ID NO: 1026 - DNA, 1407 bp, Kosakonia cowanii
  source 1..1407: mol_type = genomic DNA
gtgaaagagatgtttctgtgcagtgacaagctcaataaatatcagtcgatgggcgaaaacgggcaggctgtccatatttctgcgctgcagttgcgcgaaacccttcgcctgcgcaaacagagcgcggcggcagatgtgctcgccattccgcaaatcagtgaacacggcgaacgggttgactggtatgccccattttccggcgacgtcattccctggtcagcggccacggagagcgaacgtcaaagcgccttagcgcaactggaaaccacgcaggccacgttgcgccagctcagccaggatttcgcccagagcaaccagccggagcagcagctgtttggtaagctgctggaaaaaaccctgcaatttcccgatcccgagcatgtctggctggtcaacggcaagccggtgatcagcttctggggattcgtcaacgcccgccatcaggcacggatcgatccgctggactgcttacgtccgccgaaacccgttacgcccgcagccccactgcacagcgcgccgccggtcaacgaaccgctggtgacaccgccgaagcgtcgcggatggtggatcctgcccgcgtggttatgctggctactaccgctgctgctgttagcgcttctgctgctgtggctgctgcgcggctgcgtacccggcgtaaccattcctggctttagcgttgagaaaccggcgcttcctgacgtgcatcttccggttgcggagaatggcgccaccctgcccgttacctcctctgaacgtgttgttggcaccaccgagggcgttactgcgccagtggtgaacggcagcacgacgggcatcggcacgttgagcgatgaagagcgtgccacagctgccccggaaaacgccgccgcccttaacgatcccgccgtgccggtcgcgcctgaaacaggcagcgagcctgcgcaagctggcgttgagcccgtgacgccagaggcgcaggtgaacgacccggcgctggcggaacccaacgctactgcgggcaacgctaccgcgccggtggaggtgaaaaacccgttaagcctgccgccggaagcgctggcgcaggggcgtaccgattttcttaatggccaatggcgcgcaggcgcaggcatccaggatcagcgtaccggcaagccactgagcctcaactaccagattaaagatggcaaaggtgaagtgcagatggtgcgcggcgatggcgtctcctgccgcggtgcggtcaatgccgcaatccaggccggcaagctggccattaataaccagggtgaagcgcaatgtaccgatggctcggtttaccagatgccggagatcgtctgtgcgcccggtgctaagagcgttgccgactgtaaaggcagctacggcaccagtacccttttccccctttcgatgaagcaggaggcaagtaactaa

SEQ ID NO: 1027 - DNA, 3003 bp, Kosakonia cowanii
  source 1..3003: mol_type = genomic DNA
atgctggctgagctcactgattttaaaaaacaggtcaaacttatccgtgacagcgggattcagttcctcgacttcgctttctccctgcccgcgcgtaaagcctacggcgaatttctgcgccagcagggggaaggtgcagtgctgcgccttatctacaacgagcgtgacgacaagtttcaggtcccgacgccagacggcgaaacgccgcgcaacgccgaaccggagtatgcgctggcaattgaagattccctgagcctttatgcagggatctggttgccgctgcccttctttcgcttcaacccgccgggcggcttttctcacgggccgactaactggtcgcgcgtgcagtttcatcaactgccggagccggacgagaaaggcaacacctggcgtgcaacgctgattttcgataccaaaatctttcccgaccgcgaacatacacaatacctggcacccggcgaagatgatgtccgttccggggccggttttgcgctggcctgcttaccgcaccagatgggcgacttcctgactcttccatggattgaggagtggctgaacgatatctataccaggcaggcacacgctgtgctgcgtcagcaccctgaagacaccgaagagaagctggtgctgaaagagcatcaggcgcacttccttaacctgctcgaggtgctgaaaaagaccatcgccattccagaagtacaactcaatgacgtgaaaattcgtgataccgcgatccccgtcgacctggtgctggatattggcaactcacgcagctgcggcgtgctgattgaggagcatgcggcggataacaaaggcctctcccagctttatcagctgcaattgcgcgatctgagccagccgcagtttgtctataacgagccgtttgagagccgactggagttcgcgcaggcggagtttggcaagcaggacttctcatcgaaaagcgggcgcagcgacgcctttacctggccgaccatcggccgcgtcggcggtgaggctttccgcatggcggcgcagcgtttaggtaccgaaggctcaaccggcctctccagcccgaaacgctatctgtgggacgatcagccctactcgccgggctggcgtttcagccaggcgtttgtcaaatcggatcgtgaaccgctggcgaccgccgccccgctgctctatatgctcaatgatcatggcaagctgttgattcgcctcaatgaagatgagcggatgccggtcttctcgcctgtttacagccgcagttcattgatgaccatgatgctctcagaagtgctgagccaggcgttaatgcagatcaacagcccggcgcagcgcctgaagatgagccacgccagccatccacgtcgtttacgcaacgtgatcctgaccgtgccgccggcgatgccgaaaccagagcgcgccatctttgaagcctgcatgcatgacgctatccgcctggtgtggaaatcgcttgagtgggaagagatggattacgacggcgaagagagcggcaatgcgaagcagccgcaccccggcgttcatgtgaagtgggatgaagcgacctgcggacagctggtctatctctataacgaaacgcagaccaattttggtggccgcaccgatgagttttttgccgccacccgtcgccccgataatcagcaggcggagggggaacaacgcagcctgaagatcgcctccatcgacattggcggtggcaccaccgatctggtgatcacccgctatacgctggatgacggtaaaggcattaacgtgcgcattacaccgaaacagctcttccgcgaaggctttaaagtggcgggcgacgacattctgctggatgtcatccgtctctatctccagccagccgtaaaagcggcgatgatgaaagtcggccacagcgatatcgcggcagagtcgatgatgtcgcagctgttcggcagtgaagcgatcgaagcgggcaagcaggtgctgcgccagcagttgacgctgcaaatcttctcaccgctggcgctggccattcttcaccgctatgaagagtacaagccggagagtggccgcgaagtcctcaactataccttccgcgaactgctcaccggcactacgcctaccgccaaagtgcaggattacgttaacgacgtggtgcgcaccggacagttggcgagcgaagcgctcttctcactgctcgatgtgccgttagaggtcgatctcgcccgtctgcataatgagtttatcgatccgcgcagcggccggatgaacatctgccatagcctgcgcgccctgtgtgaagtgctctggcactacaactgcgatgtgctgctgttaacgggccgcccttcacgcctgccgggcatccaggcactgattcgccagctccagccggtgccgccgacgcgggttctgccgctgcacgggtatgaaaccggcggctggtatcccttcaacaaaaaagggtgcattgacgatccgaaatccaccgcggtggtcggcgcgatgctctgcctgctggcggagaagtcgcgtctcaacaacttctatttccgcgcggcaaactttaccgcctactcgacgatccgctacctcggcatgctggatggcaacaacgtcatcaaagacagcaacgtcttttacagcgatatcgacctcgatgccgctgacttccagctccctcagagccagccatttgaggcgcgcggtgaagtgcgtatcggtttccgccagctggataacgagcgctggccggcctcgtcgctctataccctgaaaatcaacaatcctaaccttgccagcgaactcgccggcgatgcggtgatgcgtattgagctgatggcggaacagggccgcgcgcgaaacggcgaagaggcggtaagcccggagcgtttccgtattgagtcgctggagatggagcacgccagacgaaactacagccgcaaggacgtgaccttccagttaaacacgatggttggcaatggcatgggcgaaagccagtactggctggatagcgggagcattaagagctaa

SEQ ID NO: 1028 - DNA, 2667 bp, Kosakonia cowanii
  source 1..2667: mol_type = genomic DNA
atgaacagcatcaattcgaagcaaattatccagggctggcagggcgttgaacgcggtgccggtgaagcgattgagtggatcaacgcggtgcgccaggatgcgccgcgtcttaataccgaagccgaccgtctgacgattaacctccgccgcagccgtaacaaggcgcgccgtctggcgctggcagcagcaaaaccgatgaccatcggcttctttggcctgtcgcaggcgggcaaatcctacctgatttccgcactggcggcgggtgaaaacggcaagctggagacccgcctcggcggtaagcagctcgattttctgacccacatcaacccgccgggcggcggcaaagaggcaaccggcctggtgacgcgctttagccgccgtcaggttggcggcgacgagcgctggccggtgacgctgcaactgtttagcgaaatcgagatgggcaaaattctcgccaacgcctttatccatgattttaatcaggaaaaatttgactggcagtatgacgaagggcgcatcagcgatctgttgaattcgctgaccaaacgccgtcgcccaacccgcgtggcgggcatcagtgaagatgatgtcgtctcgctgtgggattacctgagccgccatgcggaaaaaagccagagccgcttagcgctgcactactggccgcaggcgattacgctggcgccgtggctgacgccggaggatcgcggccagctcttctcggtgttatggggcgaggtggcagagctgaccgaagcttatatccgtttcgcgcaaaccctgcatcggctgggcggcgcgcaggaagtgtgggcgccgttaagcacgctggtcagcgaagagaatggcctgctggtgcagcgcgacagcattatgaatgtcgacatgctggagcggctgaataaagagaccgatatccgcattgaggtttgtccggtggtggagggccaggccgcagcgcccgtcaccctctcgctggcagaattaacggcattaaccgttgagttgcatatcccgctggtcgcctcgacccgcgagccgctgtttgagaccgtcgatctgctcgatttccccggttatcgcgggcgcctcggcgttgagtcgatggatgatattcgccgcgcggtcaacagtgaagagagcaacccgctggcgcagctgattttacgtggcaaagtcgcttatctctttgagcgctataccgaaaaccaggagatgaacgtcctggtggtctgtacagcctcgaccaagcagtcggatgtgaaagaggtgggcggcgtgctcgatgagtggatccgctacacccagggcgccgacgccgaggcgcgcggccgccgtctgccagggctaatttgggcactcaccatgttcgatctgcgcatcagccaggggctgtcgcaagaggaggcaatcctgcgacaatcctgggggctgggcgggatgatcaaaatggcaatgaccgagcgcttcggtcagtacaaatggatgcaggagtggcagcgcggacaggcgtttaacaacaccttcctcgtgcgcaagccgcgccagcagacgccgtttattcgtattagcgacggtaacgaagcggcgtttagcgaagagaacctgccgcagctccagctgatgcgcaaaaccttcctcgaagatgaagcggtcaatcgctatatcgcctcgccggacgaagcctgggacgcgatgctcgagcttaacgacggcgggatgcgccgtatggcagattacctctcgaccgttgcgcgtccggaagtgaagctcgagcgcattgccgagcagttgcaggagatccgcgatgagctgatcgagggcggtttaggcaactggtatcagccagacggcgaagaggatgcggcgaaaaaggcgcagattgcccgcgacattctggatgtgctgaaaaaacgcagcggtatgcacggcgagctattgctgcgcctggtgccgacgcgccgcgatttgcaggcactctatctgcaacaaaccacactgccggtgcaggaagaggcgcctgaagagctggatattttcgatatcggtgttggcgctgcctttggggctgaagcacctgcggcaacgacctatagccacgaaattgccttcgcgcatcagagcgtacagcactggatcaaccatctacgcggcttgtcggaaagcccggcgttgctcaactacatcaatttaccgcgcccgattatcgacgcgctggccgatgaactgattaccgccctgctccgtctgcgcgtcgaagagaagctcgttgaggcgatgaccaataccgagcaggcaggcgtgctgctggagcagatggtggaccgtcaggtgtcgcgcatcctgcatgtgatgggcgattttattacctggcttgggtacctcgagatgcccgcagcgaaacgcccgacacgcttgaatatgccggatcagcacattttcacccgcccctctcagtgcgacagcgtggtgtggaaagacgacgagcgcctggcgcgtttaacgccgcaacaactgaactacaccgccatgttcattatcgactggctggtgggactggagtcgctgattaccgagaacgcgggccactcggccggacgggagatcagcgtggcgcagaacgaaaaactgggtgccatcatccgtcagattcagacttcacaggagtaa

SEQ ID NO: 1029 - DNA, 1281 bp, Kosakonia cowanii
  source 1..1281: mol_type = genomic DNA
atgataagaataacaaggatcgttaaaccgtcagttgaattaaccgattatgccacgtcattttcgccttttcgtacgctcctcgaaacctatttacccgcctctatccaaaatttatatgcccgcccggttatcgccgatgatggtgccgttgagtggtatagcgatattaatggtcagccgcgccgcttactcgatctgagtgaaaccgagcagagccgcgcccgcgccgtgctggaacagcgtctcgacagcgttcgggccctgcatcagaagctggcgcaaagcgggagcgaaccagaaacaatgctgcgcctgctacaggcggccagtcactctcctgcacctgagcaggtgtgggtaattgacggtcacccggtgattgttccgcctgcggagggcacgccccgcgccgctgctgccgcaaccactgccgctgccgtctcaagccgtcgctggtggccatggcttttacttctggcactgcttatcgccctgattctgttgctgttgtcacgctgttcgccactgcacgaaacagcagcacccgtcacgcccgcgccaccagctgtaacgcccggcgagccggtgaaacctgaaacggcacccgcgccgcaagcgccggtaaaacccaccaaagcggtctgcccggcgcagcgaacccaacagcaagcccctgaaatggtggtgattatggacgcctccggttcgatggccatcaccatggatgccacgcaggatgagttgatcagctggaaccaggggaaatatgtcgagaatatcgaacgtgaaccgcgccgtatctcgctggcgcgtaacgcggccaaaggcattattgacactatcccgcgcgatatgaacatcagcctggtggcggcggaaaactgccgtcaggtctccctgtcgcccagcttcccctttgcccagcgatcggcgctgaaaaagcggattgaaggtattcaaccggtcggtaaaacgcctctcgccgaagccttagcgctggcgggcaaaaaggtggatggcgtgaaccgcgatgcgatcattttgctggtctctgacggagatgaaacctgcggcggcgatccctgccaggttgcccgcgagctgaaaaagagtaaaccgcgcctgcaggtgaatgtcgtcgatattatgagcaccggcgcaggaaattgtattgccagcagcaccggcggcaaagtttttgccgtcaacaatacccgggaatttaagcagatcatgaaaaaggcgatgcaagaatatattcctgagggctgcgaataa

SEQ ID NO: 1030 - DNA, 1275 bp, Kosakonia cowanii
  source 1..1275: mol_type = genomic DNA
atgataagaataacaaggatcgttaaaccttcagttgaattaaccgattatgccgcgtcattttcgccttttcgtacgctcctcgaaacctatttacccgcctctatccaaaatttatatgcccgcccggttatcgccgatgatggtgccgttgagtggtatagcgatattaatggtcagccgcgccgcttactcgatctgagtgaaaccgagcagagccgcgcccgcgcgctgctggaacagcgtctcgacagcgttcgggccctgcatcagaagctggcgcaaagcgggagcaagccagaaacaatgctgcgcctgctacaggcggccacccactctcctgcacctgagcaggtgtgggtgatcgacggccatccggtcatcgtcccacctgcggagggcgcgccccgcgccgctgctgccgccgccactgccgtctcaaggcgtcgctggtggccgtggcttttacttctggcactgcttatcgccctgattctgttgctgctgtcacgctgttcgccactgcacgaaacagcagcacccgtcacgcccgtgccaccaactgtaacgcccgaagagccggtgaaacctgaaacgacacccgcgccgcacgcgccggtaaaacccaccaaagcggtctgcccggcgcagcgaacccaacagcaagcccctgaaatggttgtgattatggacgcctccggttcgatggccatcaccatggatgccacgcaggatgagttgatcagctggaaccaggggaaatatgtcgagaatatcgaacgtgaaccgcgccgtatctcgctggcgcgtaacgcggccaaaggcattattgacactatcccgcgcgatatgaacatcagcctggtggcggcggaaaactgccgtcaggtctccctgtcgcccagcttcccgtttgcccagcgatcggcgctgaaaaagcggattgaaggtattcaaccggtcggtaaaacgcctctcgccgaagccttagcactggcgggcaaaaaagtggatggggttaaccgcgatgcgattattttgctggtttccgacggagatgaaacctgcggcggcgatccctgccaggttgcccgcgagctgaaaaagagtaaaccgcgcctgcaggtgaatgtcgtcgatattatgagcaccggtgcaggaaattgtattgccagcagcaccggcggcaaagtttttgccgtcaacaatacccgggaatttaagcagatcatgaaaaaggcgatgcaagaatatattcctgagggctgcgaataa

SEQ ID NO: 1031 - DNA, 1407 bp, Kosakonia cowanii
  source 1..1407: mol_type = genomic DNA
gtgaaagagatgtttctgtgcagtgacaagctcaataaatatcagtcgatgggcgaaaacgggcaggctgtccatatttctgcgctgcagttgcgcgaaacccttcgcctgcgcaaacagagcacggcggcagatgtgctcgccattccgcaaatcagtgaacacggcgaacgggttgactggtatgcccctttttccggcgacgtcattccctggtcagcggccacggagagcgaacgtcaaagcgccttagcgcaactggaaaccacgcaggccacgttgcgccagctcagccaggacttcgcccagagcaaccagccggagcagcagctgtttggtaagctgctggaaaaaaccctgcaatttcccgatcccgagcatgtctggctggtcaacggcaagccggtgatcagcttctggggattcgtcaacgcccgccatcaggcacggatcgatccgctggactgcttacgtccgccgaaacccgttacgcccgcagccccacttcacagcgcgccgccggtcaacgaaccgctggtgacgccgccgaagcgtcgcggatggtggatcctgcccgcgtggttatgctggctgctaccgctgctgctgttagcgcttctgctgctgtggctgctgcgcggctgcgtacccggcgtcaccattcctggctttagcgttgagaaaccggcgcttcctgacgtgcatcttccggttgcggagaatggcgccaccctgcccgtcacctcctctgaacgtgttgttggcaccaccgaaggcgttactgcgccagtggtgagcggcagcacgacgggcatcggcccattgagtgatgaagagcgtgccacagctgccccggaaaacgccgccgcccttaacgatcctgccgtgccggtcgcgcctgaaacaggcagcgagcctgcgcaagctggcgttgagcccgtgacgccagaggcgcaggtgaacgacccggcgctggcggaacccaacgctactgcgggcaacgctaccgcgccggtagaggtgaaaaacccgttaagcctgccgccggaagcgctggcgcaggggcgtaccgatttccttaatggccaatggcgcgcaggcgcaggcatccaggatcagcgtaccggcaagccgctgagcctcaactaccagattaaagatggcaaaggtgaagtgcagatggtgcgcggcgatggcgtctcctgccgcggtgcggtcaatgccgcaatccaggccggcaagctggccattaataaccagggtgaagcgcaatgtaccgatggctcggtttaccagatgccggagatcgtctgtgcgcccggtgctaagagcgttgccgactgtaaaggcagctacggcaccagtacccttttccccctttcgatgaagcaggaggcaagtaactaa

SEQ ID NO: 1032 - DNA, 3003 bp, Kosakonia cowanii
  source 1..3003: mol_type = genomic DNA
atgctggctgagctcactgattttaaaaaacaggtcaaacttatccgtgacagcgggattcagttcctcgacttcgctttctccctgcccgcacgtaaagcctacggcgagtttctgcgccagcagggcgaaggtgcagtgctgcgccttatctacaacgagcgtgacgacaagtttcaagtcccgacgccagacggcgaaacgccgcgcaacgccgaaccggagtatgcgctggcaattgaagattccctgagcctttatgcagggatctggttgccgctgcccttctttcgcttcaacccgccgggcggcttttctcacgggccgactaactggtcgcgcgtgcagtttcatcaactgccggagccggacgagaaaggcaacacctggcgtgcaacgctgattttcgataccaaaatctttcccgaccgcgaacatacacaatacctggcacccggcgaagatgatgtccgttccggggccggttttgcgctggcctgcttaccgcaccagatgggcgacttcctgactcttccatggattgaggagtggctgaacgatatctataccaggcaggcacacgctgtgctgcgtcagcaccccgaagacaccgaagagaagctggggctgaaagagcatcaggcgcacttccttaacctgctcgaggtgctgaaaaagaccatcgccattccagaagtacagctcaatgacgtgaaaattcgtgataccgcgatccccgtcgacctggtgctggatattggcaactcacgcagctgcggcgtgctgattgaggagcatgcggcggataacaaaggcctctctcagctctatcagctgcaattgcgcgatctgagccagccgcagtttgtctataacgagccgtttgagagccgactggagttcgcgcaggcggagtttggcaagcaggacttctcatcgaaaagcgggcgcagcgacgcctttacctggccgaccatcggccgcgtcggcggtgaggctttacgcatggcggcgcagcgtttaggtaccgaaggctcaaccggcctctccagcccgaaacgctatctgtgggacgatcagccctactctccgggctggcgtttcagccaggcgtttgtcaaatcggatcgtgaaccgctggcgaccgccgccccgctgctctatatgctcaatgatcatggcaagctgttgattcgcctcaatgaagatgagcggatgccggtcttctcgccggtttacagccgcagttcattgatgaccatgatgctctcagaggtgctgagccaggcgttaatgcagatcaacagcccggcgcagcgcctgaagatgagccacgccagccatccacgtcgtttacgcaacgtgatcctgaccgtgccgccggcgatgccgaaaccagagcgcgccatctttgaagcctgcatgcatgacgctatccgcctggtgtggaaatcgcttgagtgggaagagatggattacgacggcgaagagagcggcaatgcgaagcagccgcaccccggcgttcatgtgaagtgggatgaagcgacctgcggacagctggtctatctctataacgaaacgcagaccaatttcggtggccgcaccgatgagttttttgccgccacccgtcgccccgataatcagcaggcggagggggaacaacgcagcctgaagatcgcctccatcgacattggcggtggcaccaccgatctggtgatcacccgctatacgttggatgacggtaaaggcattaacgtgcgcattacaccgaaacagctcttccgcgaaggctttaaagtggcgggcgacgacattctgctggatgtcatccgtctctatctccagccagccgtaaaagcggcgatgatgaaagtcggccacagcgatatcgcggcagagtcgatgatgtcgcagctcttcggcagtgaagcgatcgaagcgggcaagcaggtgctgcgccagcagttgacgctgcaaatcttctcaccgctggcgctggccattcttcatcgctatgaagagtacaagccggagagtggccgcgaagtcctcaactataccttccgcgaactgctcaccggcactacgcctaccgccaaagtgcaggattacgttaacgacgtggtgcgcaccggccagttggcgagcgaagcgctcttctcactgctcgacgtgccgttagaggtcgatctcgcccgtctgcataatgagtttatcgatccgcgcagcggccggatgaacatctgccatagcctgcgcgccctgtgtgaagtgctctggcactacaactgcgatgtgctgctgttaacgggccgcccttcacgcctgccgggcatccaggcactgattcgccagctccagccggtgccgccgacgcgggttctgccgctgcacgggtatgaaaccggcggctggtatcccttcaacaaaaaagggtgcattgacgatccgaaatccaccgcggtggtcggcgcgatgctctgcctgctggcggagaagtcgcgtctcaacaacttctatttccgcgcggcaaactttaccgcctactcgacgatccgctacctcggcatgctggatggcaacaacgtcatcaaagacagcaacgtcttttacagcgatatcgaccttgatgccgctgacttccagctccctcagggccagccatttgaggcgcgcggtgaagtgcgtatcggtttccgccagctggataacgagcgctggccggcctcgtcgctttataccctgaaaatcaacaatccgaaccttgccagcgaactcgccggcgatgcggtgatgcgtattgagctgatggcggaacagggccgcgcgcgaaacggcgaagaggcggtcagcccggagcgtttccgtattgagtcgctggagatggagcacgccagacgaaactacagccgcaaggacgtgaccttccagttaaacacgatggttggcaatggcatgggcgaaagccagtactggctggatagcgggagcattaagagctaa

SEQ ID NO: 1033 - DNA, 2667 bp, Kosakonia cowanii
  source 1..2667: mol_type = genomic DNA
atgaacagcatcaattcgaagcaaattatccagggctggcagggcgttgaacgcggtgccggtgaagcgattgagtggatcaacgcggtgcgccaggatgcgccgcgtcttaataccgaagccgaccgtctgacgattaacctccgccgcagccgtaacaaggcgcgccgtctggcgctggcagcagcaaaaccgatgaccatcggcttctttggcctatcgcaggcgggcaaatcctacctgatttccgcactggcggcgggtgaaaacggcaagctggagacccgcctcggcggtaagcagctagattttctgacccacatcaacccgccgggcggcggcaaagaggcaaccggcctggtgacgcgctttagccgccgtcaggttggcggcgacgagcgctggccggtgacgctgcaactgtttagcgaaatcgagatgggcaaaattctcgccaacgcctttatccatgattttaatcaggaaaaattcgactggcagtatgacgaagggcgcatcaacgatctgctggcctcgctgaccaaacgccgtcgcgcaacccgcgtggcgggcatcagtgaagatgatgtcgtctcgctgtgggattacctgagccgccatgcggaaaaaagccagagccgcttagcgctgcactactggccgcaggcgattacgctggcgccgtggctgacgccggaggatcgcggccagctcttctcggtgttatggggcgaggtggcagagctgaccgaagcctatatccgttttgcgcaaaccctgcatcggctgggcggcgcgcaggaagtgtgggcgccgttaagcacgctggtcagcgaagagaatggcctgctggtgcagcgcgacagcattatgaatgtcgacatgctggagcggctgaataaagagaccgatatccgcattgaggtctgtccggtggtggagggccaggccgcagcgcccgtcaccctctcgctggcagaattaacggcattaaccgttgagttgcatattccgctggtcgcctcgacccgcgagccgctgtttgagaccgtcgatctgctcgatttccccggttatcgcgggcgcctcggcgttgagtcgatggatgatattcgccgcgcggtcaacagtgaagagagcaacccgctggcgcagctgattttacgtggcaaagtcgcttatctctttgagcgctataccgaaaaccaggagatgaacgtcctggtggtctgtacggcttccaccaagcagtcggatgtgaaagaggtgggcggcgtgctcgatgagtggatccgctacacccagggcgccgacgccgaggcgcgcggccgccgtctgccggggctaatttgggcgctgaccatgttcgatctgcgcatcagccaggggctgtcgcaagaggaggcaatcctgcgacaatcctgggggctgggcgggatgatcaaaatggcaatgaccgagcgcttcggtcagtacaaatggatgcaggagtggcagcgcggacaggcgtttaacaacaccttccttgtgcgcaagccgcgccagcagacgccgtttattcgtattagcgacggtaacgaagcggcatttagcgaagagaacctgccgcagctccagctgatgcgcaaaaccttcctcgaagatgaagcggtcaatcgctatgtcgcctcgccggacgaagcctgggacgccatgctcaagcttaacgacggcgggatgcgccgtatggctgattacctctcgaccgttgcgcgtccggaagtgaagctcgagcgcattgccgagcagttgcaggagagccgcgatgagctgatcgagggcggtttaggcaactggtatcagccagacggcgaagaggatgcggcgaaaaaggcgcagattgcccgcgacattctggatgtgctgaaaaaacgcagcggtatgcacggcgagctattgctgcgcctggtgccgacgcgccgcgatttgcaggcactctatctgcaacaaaccacactgccggtgcaggaagaggcgcctgaagagctggatattttcgatatcggcgtcggcgctgcctttggggcagaagcacctgcggcaacgacctatagccacgaaattgccttcgcgcatcagagcgtgcagcactggatcaaccatctacgcggcttgtcggaaagcccggcgttgctcaactacatcaatttaccgcgcccgattatcgacgcgctggccgatgaactgattaccgccctgctccgtctgcgcatcgaagagaagctcgttgaggcgatgaccaataccgagcaggcaggcgtgttgctggagcagatggtggaccgtcaggtatcgcgcatcctgcatgtgatgggcgattttattacctggcttgggtacctcgagatgcccgcagcgaaacgcccgacacgcttgaatatgccggatcagcacattttcacccgcccctctcagtgcgacagcgtggtgtggaaagacgacgagcgtctggcgcgtttaacgccgcaacaactgaactacaccgccatgttcattatcgactggctggtgggactggagtcgctgattaccgagaacgcgggccactcggccggtcgggagatcagcgtggcgcagaacgaaaaactgggcgccatcatccgtcagattcagacttcacaggagtaa

SEQ ID NO: 1034 - DNA, 1281 bp, Kosakonia cowanii
  source 1..1281: mol_type = genomic DNA
atgataagaataacaaggatcgttaaaccttcagttgaattaaccgattatgccgcgtcattttcgccttttcgtacgctcctcgaaacctatttacccgcctctatccaaaatttatatgcccgcccggttatcgccgatgatggtgccgttgagtggtatagcgatattaatggtcagccgcgccgcttactcgatctgagtgaaaccgagcagagccgcgcccgcgcggtgctggaacagcgtctcgacagcgttcgggccctgcatcagaagctggcgcaaagcgggagcgagccagaaacaatgctgcgcctgctacaggcggccacccactctcctgcacctgagcaggtgtgggtgatcgacggccatccggtcatcgtcccacctgcggagggcgcgccccgcgccgctgctgccgccaccactgccgctgccgtctcaaggcgtcgctggtggccgtggcttttacttctggctctgcttatcgccctgattctgttgctgctgtcacgctgttcgccactgcacgaaacagcagcacccgtcacgcccgcgccaccagctgtaacgcccggcgagccggtgaaacctgaaacgacacccgcgccgcacgcgccggtaaaacccaccaaagcggtctgcccggcgcagcgaacccaacagcaagcccctgaaatggtggtaattatggacgcctccggttcgatggctatcaccatggatgccacgcaggatgagttgatcagctggaaccaggggaaatatgtcgagaatatcgaacgtgaaccgcgccgtatctcgctggcgcgtaacgcggccaaaggcattattgacactatcccgcgcgatatgaacatcagcctggtggcggcggaaaactgccgtcaggtctccctgtcgcccagcttcccgtttgcccagcgatcggcgctgaaaaagcgcattgaaggtattcaaccggtcggtaaaacgcctctcgccgaagccttagcactggcgggcaaaaaagtggatggggttaaccgcgatgcgattattttgctggtttccgacggagatgaaacctgcggcggcgatccctgccaggttgcccgcgagctgaaaaagagtaaaccgcgcctgcaggtgaatgtcgtcgatattatgagcaccggagcaggaaattgtattgccagcagcaccggcggcaaagtttttgccgtcaacaatacccgggaatttaagcagatcatgaaaaaggcgatgcaagaatatattcctgagggctgcgaatga

SEQ ID NO: 1035 - DNA, 1407 bp, Kosakonia cowanii
  source 1..1407: mol_type = genomic DNA
gtgaaagagatgtttctgtgcagtgacaagctcaataaatatcagtcgatgggcgaaaacgggcaggctgtccatatttctgcgctgcagttgcgcgaaacccttcgcctgcgcaaacagagcgcggcggcagatgtgctcgccattccgcaaatcagtgaacacggcgaacgggtcgactggtatgcccctttttccggcgacgtcattccctggtcagcggccacggagagcgaacgtcaaagcgccttagcgcaactggaaaccacgcaggccacgttgcgccagctcagccaggacttcgcccagagcaaccagccggagcagcagctgtttggtaagctgctggaaaaaaccctgcaatttcccgatcccgagcatgtctggctggtcaacggcaagccggtgatcagcttctggggattcgtcaacgcccgccatcaggcacggatcgatccgctggactgcttacgtccgccgaaacccgtcacgcccgcagccccactgcacagcgcgccgccggtcaacgaaccgctggtgacgccgccgaagcgtcgcggatggtggatcctgcccgcgtggttatgctggctgctaccgctgctgctgttagcgcttctgctgctgtggctgctgcgcggctgcgtacccggcgtaaccattcctggctttagcgttgagcaaccagcactgcctgatgcgcaccttccggttacggagaatggcgccaccctgcccgtcacctcctctgaacgtgttgttggcaccaccgaaggcgttactgcgccagtggtgagcggcagtacgacgggcatcgtcccgttgagtgatgaagagcgtgccacagctgccccggaaaacgccgccgcccttaacgatcctgccgtgccggtcgcgcctgaaacaggcagcgagcctgcgcaagctggcgttgagcccgtgacgccagaggcgcaggtgaacgacccggcgctggcggaacccaacgctactgcgggcaacgctaccgcgccggtggaggtgaaaaacccgttaagcctgccgccggaagcgctggcgcaggggcgtaccgatttcctcaatggccaatggcgcgcaggcgcaggcatccaggatcagcgtaccggcaagccgctgagcctcaactaccagattaaagatggcaaaggtgaagtgcagatggtgcgcggcgatggcgtctcctgccgcggtgcggtcaatgccgcaatccaggccggcaagctggccattaataaccagggtgaagcgcaatgtaccgatggctcggtttaccagatgccggagatcgtctgtgcgcccggtgctaagagcgttgccgactgtaaaggcagctacggcaccagtacccttttccccctttcgatgaagcaggaggcaagtaactaa

SEQ ID NO: 1036 - DNA, 3003 bp, Kosakonia cowanii
  source 1..3003: mol_type = genomic DNA
atgctggctgagctcactgattttaaaaaacaggtcaaacttatccgtgacagcgggattcagttcctcgacttcgctttctccctgcccgcacgtaaagcctacggcgagtttctgcgccagcagggcgaaggtgcggtgctgcgccttatctacaacgagcgtgacgacaagttccaggtcccgacgccagacggcgaaacgccgcgcaacgccgaaccggagtatgcgctggcgattgaagattccctgagcctttatgcggggatctggttgccgctgcccttctttcgcttcaacccgccgggcggcttttctcacgggccgactaactggtcgcgcgtgcagtttcatcaactgccggagccggacgagaaaggcaacacctggcgtgcaacgctgattttcgataccaaaatctttcccgaccgcgaacatacacaatacctggcacccggcgaagatgatgtccgttccggggccggttttgcgctggcctgcttaccgcaccagatgggcgacttcctgactcttccatggattgaggagtggctgaacgatatctataccaggcaggcgcacgctgtgctgcgtcagcaccctgaagacaccgaagagaagctggggctgaaagagcatcaggcgcacttccttaacctgctcgaggtgctgaaaaagaccatcgtcattccagaagtacagctcaatgacgtgaaaattcgtgataccgcgatccccgtcgacctggtgctggatattggcaactcacgcagctgcggcgtgctgattgaggagcatgcggcggataacaaaggcctctcccagctttatcagctgcaattgcgcgatctgagccagccgcagtttgtctataacgagccatttgagagccgactggagttcgcgcaggcggagtttggcaagcaggacttctcatcgaaaagcgggcgcagcgacgcctttacctggccgaccatcggccgcgtcggcggtgaggctttccgcatggcggcgcagcgtttaggtaccgaaggctcaaccggcctctccagcccgaaacgctatctgtgggacgatcagccctactcgccgggctggcgttttagccaggcgtttgtcaaatcggatcgtgaaccgctggcgaccgccgccccgctgctctatatgctcaatgatcatggcaagctgttgattcgcctcaatgaagatgagcggatgccggtcttctcgccggtttacagccgcagttcattgatgaccatgatgctctcagaggtgctgagccaggcgttaatgcagatcaacagcccggcgcagcgcctgaagatgagccacgccagccatccacgtcgtttacgcaacgtgatcctgaccgtgccgccggcgatgccgaaaccagagcgcgccatctttgaagcctgcatgcatgacgctatccgcctggtgtggaaatcgctggagtgggaagagatggattacgacggcgaagagagcggcaatgcgaagcagccacaccccggcgttcatgtgaagtgggatgaagcgacctgcggacagctggtctatctctataacgaaacgcagaccaattttggtggccgcaccgatgagttttttgccgccacccgtcgccccgataatcagcaggcggagggggaacaacgcagcctgaagatcgcctccatcgacattggcggtggcaccaccgatctggtgatcacccgctatacgctggatgacggtaaaggcattaacgtgcgcattacaccgaaacagctcttccgcgaaggctttaaagtggcgggcgacgacattctgctggatgtcatccgtctctatctccagccagccgtaaaagcggcgatgatgaaagtcggccacagcgatatcgcggcagagtcgatgatgtcgcagctgttcggcagtgaagcgatcgaagcgggcaagcaggtgctgcgccagcagttgacgctgcaaatcttctcaccgctggcgctggccattcttcatcgctatgaagagtacaagccggagagtggccgcgaagtcctcaactataccttccgcgaactgctcaccggcactacgcctaccgccaaagtgcaggattacgttaacgacgtggtgcgcaccggccagttggcgagcgaagcgctcttctcactgctcgatgtgccgttagaggtcgatctcgcccgtctgcataatgagtttatcgatccgcgcagcggccggatgaacatctgccatagcctgcgcgccctgtgtgaagtgctctggcactacaattgtgatgtgctgctgttaacgggccgcccttcacgcctgccgggcatccaggcgctgattcgccagctccagccggtgccgccgacgcgggttctgccgctgcacgggtatgaaaccggcggctggtatcccttcaacaaaaaagggtgcattgacgatccgaaatccaccgcggtggtcggcgcgatgctctgcctgctggcggagaagtcgcgtctcaacaacttctatttccgcgcggcaaactttaccgcctactcgacgatccgctacctcggcatgctggatggcaacaacgtcatcaaagacagcaacgtcttttacagcgatatcgaccttgatgccgctgacttccagctgcctcagggccagccatttgaggcgcgcggtgaagtgcgtatcggtttccgtcagctggataacgagcgctggccggcctcgtcgctctataccctgaaaatcaacaatcctaaccttgccagcgaactcgccggcgatgcggtgatgcgtattgagctgatggcggaacagggccgcgcgcgaaacggcgaagaggcggtcagcccggagcgtttccgtattgagtcgctggagatggagaacgccagacgaaactacagccgcaaggacgtgaccttccagttaaacacgatggttggcaatggcatgggcgaaagccagtactggctggatagcgggagcattaagagctaa

SEQ ID NO: 1037 - DNA, 2667 bp, Kosakonia cowanii
  source 1..2667: mol_type = genomic DNA
atgaacagcatcaattcgaagcaaattatccagggctggcagggcgttgaacgcggtgccggtgaagcgattgagtggatcaacgcggtgcgccaggatgcgccgcgtcttaataccgaagccgaccgtctgacgattaacctccgccgcagccgtaacaaggcgcgccgtctggcgctggcagcagcaaaaccgatgaccatcggcttctttggcctgtcgcaggcgggcaaatcctacctgatttccgcactggcggcgggtgaaaacggcaagctggagacccgcctcggcggtaagcagctcgattttctgacccacatcaacccgccgggcggtggcaaagaggcaaccggcctggtgacgcgctttagccgccgtcaggttggcggcgacgagcgctggccggtgacgctgcaactgtttagcgaaatcgagatgggcaaaattctcgccaacgcctttatccatgattttaatcaggaaaaattcgactggcagtatgacgaagggcgcatcagcgatctgttgaattcgctggccaaacgccgtcgcccaacccgcgtggcgggcatcagtgaagatgatgtcgtctcgctgtgggattacctgagccgccatgcggaaaaaagccagagccgcttagcgctgcactactggccgcaggcgattacgctggcgccgtggctgacgccggaggatcgcggtcagctcttctccgtgttatggggcgaggtggcagagctgaccgaagcttatatccgtttcgcgcaaaccctgcatcggctgggcggcgcgcaggaagtgtgggcgccgttaagcacgctggtcagcgaagagaatggcctgctggtgcagcgcgacagcattatgaatgtcgacatgctggagcggctgaataaagagaccgatatccgcattgaggtttgtccggtggtggagggccaggccgcagcgcccgtcaccctctcgctggcagaattaacggcattaaccgttgagttgcatatcccgctggtcgcctcgacccgcgagccgctgtttgagaccgtcgatctgctcgatttccccggttatcgcgggcgcctcggcgttgagtcgatggatgatattcgccgcgcggtcaacagtgaagagagcaacccgctggcgcagctgattttacgtggcaaagtcgcttatctctttgagcgctataccgaaaaccaggagatgaacgtcctggtggtctgtacagcctcgaccaagcagtcggatgttaaagaggtgggcggcgtgctcgatgagtggatccgctacacccagggcgccgacgccgaggcgcgcggccgccgtctgccggggctaatttgggcgctgaccatgttcgatctgcgcatcagccaggggctgtcgcaagaggaggcaatcctgcgacaatcctgggggctgggcgggatgatcaaaatggcaatgactgagcgcttcggtcagtacaaatggatgcaggagtggcagcgcggacaggcgtttaacaacaccttccttgtgcgcaagccgcgtcagcagacgccgtttattcgtattagcgacggtaacgaagcggcgtttagcgaagagaacctgccgcagctccaactgatgcgcaaaaccttcctcgaagatgaagcggtcaatcgctatatcgcctcgccggacgaagcctgggacgcgatgctcgagcttaacgacggcgggatgcgccgtatggctgattacctctcgaccgttgcgcgtccggaagtgaagctcgagcgcattgccgagcagttgcaggagatccgcgatgagctgatcgagggcggtttaggcaactggtatcagccagacggcgaagaggatgcggcgaaaaaggcgcagattgcccgcgacattctggatgtgctgaaaaaacgcagcggtatgcacggcgagctgttgctgcgcctggtgccgacgcgccgcgatttgcaggcactctatctgcaacaaaccacactgccggtgcaggaagaggcgcctgaagagctggatattttcgatatcggtgttggcgctgcctttggggctgaagcacctgcggcaacgacctatagccacgaaattgccttcgcgcatcagagcgtgcagcactggatcaaccatctacgcggcttgtcggaaagcccggcgttgctcaactacatcaatttaccgcgcccgattatcgacgcgctggccgatgaactaattaccgccctgctccgtctgcgcgtcgaagagaagctcgttgaggcgatgaccaataccgagcaggcaggcgtgctgctggagcagatggtggaccgtcaggtgtcgcgcatcctgcatgtgatgggcgattttattacctggcttgggtacctcgagatgcccgcagcgaaacgcccgacacgcttgaatatgccggatcagcacattttcacccgcccctctcagtgcgacagcgtggtgtggaaagacgacgagcgcctggcgcgtttaacgccgcaacaactgaactacaccgccatgttcattatcgactggctggtgggactggagtcgctgattaccgagaacgcgggccactcggccggacgggagatcagcgtggcgcagaacgaaaaactgggcgccatcatccgtcagattcagacttcacaggagtaa

SEQ ID NO: 1038 - DNA, 1281 bp, Kosakonia cowanii
  source 1..1281: mol_type = genomic DNA
atgataagaataacaaggatcgttaaaccgtcagttgaattaaccgattatgccacgtcattttcgccttttcgtacgctcctcgaaacctatttacccgcctctatccaaaatttatatgcccgcccggttatagccgatgatggtgccgttgagtggtatagcgatattaatggtcagccgcgccgcttactcgatctgagtgaaaccgagcagagccgcgcctgcgccgtgctggaacagcgtctcgacagcgttcgggcactgcatcagaagctggcgcaaagcgggagcgaaccagaaacaatgctgcgcctgctgcaggcggccagtcactctcctgcacctgagcaagtgtgggtgattgacggtcacccggtgattgttccgcctgcggagggcacgccccgcgccgctgctgccgcaaccactgccgctgccgtctcaagccgtcgctggtggccatggcttttacttctggcactgcttatcgccctgattctgttgctgttgtcacgctgttcgccactgcatgaaacagcagcacccgtcacgcccgcgccaccagctgtaacgcccggcgagccggtgaaacctgaaacggcacccgcgccgcaagcgccggtaaaacccaccaaagcggtctgcccggcgcagcgaacccaacagcaagcccctgaaatggtggtgattatggacgcctccggttcgatggccatcaccatggatgccacgcaggatgagttgatcagctggaaccaggggaaatatgtcgagaatatcgaacgtgaaccgcgccgtatctcgctggcgcgtaacgcggccaaaggcattattgacactatcccgcgcgatatgaacatcagcctggtggcggcggaaaactgccgtcaggtctccctgtcgcccagcttcccctttgcccagcgatcggcgctgaaaaagcggattgaaggtattcaaccggtcggtaaaacgcctctcgccgaagccttagcgctggcgggcaaaaaggtggatggcgtgaaccgcgatgcgatcattttgctggtctctgacggagatgaaacctgcggcggcgatccctgccaggttgcccgcgagctgaaaaagagtaaaccgcgcctgcaggtgaatgtcgtcgatattatgagcaccggcgcaggaaattgtattgccagcagcaccggcggcaaagtttttgctgtaaacaatacccgggaatttaagcagatcatgaaaaaggcgatgcaagaatatattcctgagggctgcgaataa

SEQ ID NO: 1039 - DNA, 1407 bp, Kosakonia cowanii
  source 1..1407: mol_type = genomic DNA
gtgaaagagatgtttctgtgcagtgacaagctcaataaatatcagtcgatgggcgaaaacgggcaggctgtccatatttctgcgctgcagttgcgcgaaacgcttcgcctgcgcaaacagggcgcggcggccgatgtgctcgccattccgcaaattagtgaacacggcgaacgtattgactggtatgccccttttccgggcgatgtcattccctggtcagcggccacggagagcgaacgtcaaagcgccctggcgcagctggaaaccacgcaggctacgctgcgccagctcagccaggatttcgcccagagcaaccagccggagcagcagctgtttggtaagttgctggaaaaaaccctgcaatttcccgatcccgagcatgtctggctggtcaacggcaagccggtgatcagcttctggggattcgtcaacgcccgccatcaggcacggatcgatccgctggattgcttacgtccgccgaaacccgttacgcccgcggccccgcagcacagcgcgccgccgatcaacgagccggtggtaacgccgccgaagcgtcgcggatggtggatcctgcccgcgtggttatgttggctgttaccgctgcttcttttagcacttctgctgctgtggctgctgcgcggctgcgtacccggcgtaactattcctggctttagcgttgagcaaccggcactgcctgatgcgcaccttccggttgcggagaatggcgccaccctgcccgtcacctcctctgaacgtgttgttggcactaccgagggcgttactgcgccagcggtgagcggcagcacgacgggcatcggcccgttgagtgatgaagagagcgccacagttaccccggaaaacgccgccgcccttaacgatcctgccgtgccggtcgcgcctgaaacaggcagcgagcctgcgcaagctggcgttgagcccgtgacgccagaggcgcaggtgaacgacccggcgctggcggaacccaacgctaccgcgggcaatgctaccgcgccggtggaggtgaaaaatccgttaagcctgccgccggaagcgctggcgcaggggcgtaccgatttcctcaatggccaatggcgcgcaggcgcaggcatccaggatcagcgtaccggcaagccgctgagcctcaactaccagattaaagatggcaaaggtgaagtgcagatggtgcgcggcgatggcgtctcctgccgcggcgcggtcaatgccgccatccaggccggcaagctggccattaataaccagggtgaagcgcaatgtaccgatggctcggtttaccagatgccggagatcgtctgtgcgcccggtgctaagagcgttgccgactgtaaaggcagctacggcaccagtacccttttccccctttcgatgaagcaggaggcaagtaactaa

SEQ ID NO: 1040 - DNA, 3003 bp, Kosakonia cowanii
  source 1..3003: mol_type = genomic DNA
atgctggctgagctcactgattttaaaaaacaggtcaaacttatccgtgacagcgggattcagttcctcgacttcgctttctccctgcccgcgcgtaaagcctacggcgagtttctgcgccagcagggcgaaggtgcagtgctgcgccttatctacaacgagcgtgacgacaagtttcaggtcccgacgccagacggcgaaacgccgcgcaacgccgagccggagtatgcgctggcgattgaagattccctgaacctttatgcggggatctggttgccgctgcccttctttcgcttcaacccaccgggcggcttttctcacgggccgactaactggtcgcgcgtgcagtttcatcaactgccggagccggatgagaaaggcaacacctggcgtgcaacgctgattttcgataccaaaatctttcccgaccgcgaacatacacaatacctggcacccggcgaagatgatgtccgttccggggccggttttgcgctggcctgcttaccgcaccagatgggcgacttcctgactcttccatggattgaggagtggctgaacgatatctataccaggcaggcacacgctgtgctgcgtcagcaccctgaagacaccgaagagaagctggggctgaaagagcatcaggcgcacttccttaacctgctcgaggtgctgaaaaagaccatcgccattccagaagtacagctcaatgacgtgaaaattcgtgataccgcgatccccgtcgacctggtgctggatattggcaactcacgcagctgcggcgtgctaattgaggagcatgcggcggataacaaaggactctcccagctttatcagctgcaattgcgcgatctgagccagccgcagtttgtctataacgagccatttgagagccgactggagttcgcgcaggcggagtttggcaagcaggacttctcgtcgaaaagtgggcgcagcgacgcctttacctggccgaccatcggccgtgtcggcggtgaggctttccgcatggcggcgcagcgtttaggcaccgaaggctcaaccggcctctccagcccgaaacgctatctgtgggacgatcagccctactctccgggctggcgtttcagccaggcgtttgtcaaatcggatcgtgaaccgctggcaaccgccgcaccgctgctctatatgctcaacgatcatggcaagctgttgattcgcctcaatgaagatgagcggatgccggtcttctcgccggtttacagccgcagttcattgatgaccatgatgctctcagaagtgctgagccaggcgttaatgcagatcaacagcccggcgcagcgcctgaagatgagccacgccagccatccgcgtcgtttacgcaacgtgatcctgaccgtaccgccggcgatgccgaaaccagagcgcgccatttttgaagcctgcatgcatgacgctatccgcctggtgtggaaatcgctggagtgggaagagatggattacgacggcgaagagagcggcaatgcgaagcagccgcaccccggcgttcatgtgaagtgggatgaagcgacctgcggacagctggtctatctctataacgaaacgcagaccaatttcggtggccgcaccgatgagttttttgccgccacccgtcgccccgataatcagcaggcggaaggggaacagcgcagcctgaagatcgcctccatcgacattggcggcggcaccaccgatctggtgatcacccgctatacgctggatgacggtaaaggcattaacgtgcgtattacaccgaaacagctcttccgtgaaggctttaaagtggcgggcgacgacattctgctggatgtcatccgtctctatctccagccagccgtaaaagcggcgatgatgaaagtcggccacagcgatatcgcggcagagtcgatgatgtcgcagctgttcggcagcgaagcgatcgaagcgggcaagcaggtgctgcgccagcagttgacgctgcaaatcttctcgccgctggcgctggccattcttcatcgatatgaagagtacaagccggagagtggccgcgaagtcctcaactataccttccgcgaactgctcaccggcactacacctaccgccaaagtgcaggattacgttaacgacgtggtgcgcaccggccaactggcgaatgaagcgcccttctcactgctcgatgtgccgttagaggtcgatctcgcccgtctgcataatgagtttatcgatccacgcagcggccggatgaacatctgccatagcctgcgcgccctgtgtgaagtgctctggcactacaactgcgatgtgctgctgttaacgggacgcccttcacgcctgccgggcatccaggcgctgattcgccagctccagccggtgccgccgacgcgggttctgccgctgcacgggtatgaaaccggcggctggtatcccttcaacaaaaaagggtgcattgacgatccgaaatccaccgcggtggtcggcgcgatgctctgcctgctggcggagaagtcgcgtctcaacaacttctatttccgcgcggcaaactttaccgcctactcgacgatccgctacctcggcatgctggatggcaacaacgtcatcaaagacagcaacgtcttttacagcgatatcgacctcgatgccgctgacttccagctccctcagggcctgccatttgaggcgcgcggtgaagtgcgtatcggtttccgccaactggataacgagcggtggccggcctcgtcgctctataccctgaaaatcaacaatccgaaccttgccagcgaactcgccggcgatgcggtgatgcgtattgagctgatggcggaacagggccgcgcgcgaaacggcgaagaggctgtgagcccggagcgtttccgtattgaatcgctggagatggagaacgccagacgaaactacagccgcaaggacgtgaccttccagttaaacacgatggttggcaatggcatgggcgaaagccagtactggctggatagcgggagcattaagagctaa

SEQ ID NO: 1041 - DNA, 2667 bp, Kosakonia cowanii
  source 1..2667: mol_type = genomic DNA
atgaacagcatcaattcgaagcaaattatccagggctggcagggcgttgaacgcggtgccggtgaagcgattgagtggatcaacgcggtgcgccaggatgcgccgcgtcttaataccgaagccgaccgtctgacgattaacctccgccgcagccgtaacaaggcgcgccgtctggcgctggcagcggcaaaaccgatgaccatcggcttctttggcctgtcgcaggcgggcaaatcctacctgatttccgcgctggcggcgggtgaaaacggcaagctggagacccgcctcggcggtaaacagctcgattttctgacccacatcaacccgccgggcggtggcaaagaggcaaccggcctggtgacgcgctttagccgccgtcaggttggcggcgacgaacgctggccggtgacgctgcaactgtttagcgaaatcgagatgggcaaaattctcgccaacgcctttatccatgattttaatcaggaaaaatttgactggcagtatgacgaagggcgcatcaacgatctgctggcctcgctgaccaaacgacgtcgcccaacccgcgtggcgggcatcagtgaagatgatgtcgtctcgctgtgggattacctgagccgccatgcggaaaaaagccagagccgcttagcgctgcactactggccgcaggcgattacgctggcgccgtggctgacgccggaggatcgcggccagctcttctccgtgttatggggcgaggtggcagagctgaccgaagcctatatccgttttgcgcaaaccctgcatcggctgggcggcgcgcaggaagtgtgggcaccgttaagcacgctggtcagcgaagagaatggcctgctggtgcagcgcgacagcattatgaatgtcgacatgctggagcggctgaataaagagaccgatatccgcattgaggtctgcccggtggtggaaggcctggccgcagcgcccgttaccctgtcgctggcagaattaacggcattaaccgttgagttgcatatcccgctggtcgcctcgacccgcgagccgctgtttgagaccgtcgatctgctcgatttccccggttatcgcggacgcctcggcgttgagtcgatggatgacattcgccgcgcggttaatagcgaagagagcaacccgctggcgcagctgattttacgtggcaaagtcgcttatctctttgagcgctataccgaaaaccaggagatgaacgtcctggtggtctgtacagcctcgaccaagcagtcggatgttaaagaggtgggcggcgtgctcgatgagtggatccgctacacccagggcgccgacgccgaggcgcgcggccgccgtctgccggggctaatttgggcgctgaccatgttcgatctgcgcatcagccaggggctgtcgcaagaggaggcaatcctgcgacaatcctgggggctgggcgggatgatcaaaatggcaatgaccgagcgcttcggtcagtacaaatggatgcaggagtggcagcgcggacaggcgtttaacaacaccttccttgtgcgcaagccgcgccagcagacgccgtttattcgtattagcgacggtaacgaagcggcgtttagcgaagagaacctgccgcagctccagttgatgcgcaaaaccttccttgaagatgaagcggttaaccgctatatcgcctcgccggatgaagcctgggacgcgatgctcgagcttaacgacggcgggatgcgccgcatggctgattacctctcgaccgttgcgcgtccggaagtgaagctcgagcgcattgccgagcagttgcaggagatccgcgatgagctgatcgagggcgggttaggcaactggtatcagccagacggcgaagaggatgcggcgaaaaaggcgcagattgcccgcgacattctggatgtgctgaaaaaacgcagcggtatgcacggcgagctgttgctgcgcctggtgccgacgcgccgcgatttgcaggcactctatctgcaacaaaccacactgccggtgcaggaagagacgcctgaagagctggatatcttcgatatcggtgttggcgctgcctttggggctgaagcacctgcggcaacgacctatagccacgaaattgccttcgcgcatcagagcgtacagcactggatcaaccatctgcgtggcttgtcggaaagcccggcgttgctcaactacatcaatttaccgcgcccgattatcgacgcgctggccgatgaactgattaccgccctgctccgtctgcgcatcgaagagaagctcgttgaggtgatgaccaataccgagcaggccggcgtgctgctggagcagatggtggaccgccaggtgtcgcgcatcctgcatgtgatgggcgattttattacctggcttggatacctcgagatgcccgcagcgaaacgcccgacacgcttgaatatgccggagcagcacattttcacccgcccctctcagtgcgacagcgtggtgtggaaagacgacgagcgcctggcgcgtttaacgccgcaacaactgaactacaccgccatgttcattatcgactggctggtgggactggagtcgctgattaccgagaacgcgggccactcggccggtcgggagatcagcgtggcgcagaacgaaaaactgggcgccatcatccgtcagattcagacttcacaggagtaa

SEQ ID NO: 1042 - DNA, 1407 bp, Kosakonia cowanii
  source 1..1407: mol_type = genomic DNA
gtgaaagagatgtttctgtgcagtgacaagctcaataaatatcagtcgatgggcgaaaacgggcaggctgtccatatttctgcgctgcagttgcgcgaaacgcttcgcctgcgcaaacagggcgcggcggccgatgtgctcgccattccgcaaattagtgaacacggcgaacgtattgactggtatgccccttttccgggcgatgtcattccctggtcagcggccacggagagcgaacgtcaaagcgccctggcgcagttggaaaccacgcaggccacgctgcgccagctcagccaggatttcgcccagagcaaccagccggagcagcagctgtttggtaagttgctggaaaaaaccctgcaatttcccgatcccgagcatgtctggctggtcaacggcaagccggtgatcagcttctggggattcgtcaacgcccgccatcaggcacggatcgatccgctggattgcttacgtccgccgaaacccgttacgcccgcggccccgcagcacagcgcgccgccgatcaacgagccggtggtaacgccgccgaagcgtcgcggatggtggatcctgcccgcgtggttatgttggctgttaccgctgcttcttttagcacttctgctgctgtggctgctgcgcggctgcgtacccggcgtaactattcctggctttagcgttgagcaaccggcactgcctgatgcgcaccttccggttgcggagaatggcgccaccctgcccgtcacctcctctgaacgtgttgttggcactaccgagggcgttactgcgccagcggtgagcggcagcacgacgggcatcggcccgttgagtgatgaagagggcgccacagctaccctggaaaacgccgccgcccttaacgatcccgccgtgccggtcgcgcctgaaacaggcagcgagcctacgcaagctggcgttgagcccgtgacgccagaggcgcaggtgaacgacccggcgctggcggaaccaaatgctaccgcgggcaatgctaccgcgccggtggaggtgaaaaacccgttaagcctgccgccggaagcgctggcgcaggggcgtaccgatttcctcaatggccaatggcgcgcaggcgcaggcatccaggatcagcgtaccggcaagccgctgagcctcaactaccagattaaagatggcaaaggtgaagtgcagatggtgcgcggcgatggcgtctcctgccgcggcgcggtcaatgccgccatccaggccggcaagctggccattaataaccagggtgaagcgcaatgtaccgatggctcggtttaccagatgccggagatcgtctgtgcgcccggtgctaagagcgttgccgactgtaaaggcagctacggcaccagtacccttttccccctttcgatgaagcaggaggcaagtaactaa

SEQ ID NO: 1043 - DNA, 3003 bp, Kosakonia cowanii
  source 1..3003: mol_type = genomic DNA
atgctggctgagctcactgattttaaaaaacaggtcaaacttatccgtgacagcgggattcagttcctcgacttcgctttctccctgcccgcgcgtaaagcctacggcgagtttctgcgccagcagggcgaaggtgcggtgctgcgccttatctacaacgagcgtgacgacaagtttcaggtcccgacgccagacggcgaaacgccgcgcaacgccgaaccggagtatgcgctggcaattgaagattccctgagcctttatgcggggatctggttgccgctgcccttctttcgcttcaacccaccgggcggcttttctcacgggccgactaactggtcgcgcgtgcagtttcatcaactgccggagccggatgagaaaggcaacacctggcgtgcaacgctgattttcgataccaaaatctttcctgaccgcgaacatacacaatacctggcacccggcgaagatgatgtccgttccggggccggttttgcgctggcctgcttaccgcaccagatgggcgacttcctgactcttccatggattgaggagtggctgaacgatatctataccaggcaggcacacgctgtgctgcgtcagcaccctgaagacaccgaagagaagctggggctgaaagagcatcaggcgcacttccttaacctgctcgaggtgctgaaaaagaccatcgccattccagaagtacagctcaatgacgtgaaaattcgtgataccgcgatccccgtcgacctggtgctggatattggcaactcacgcagctgcggcgtgctaattgaggagcatgcggcggataacaaaggcctctcccagctttatcagctgcaattgcgcgatctgagccagccgcagtttgtctataacgagccatttgagagccgactggagttcgcgcaggcggagtttggcaagcaggacttctcgtcgaaaagcgggcgcagcgacgcctttacctggccgaccatcggccgtgtcggcggtgaggctttccgcatggcggcgcagcgtttaggcaccgaaggctcaaccggcctctccagcccgaaacgctatctgtgggacgatcagccctactctccgggctggcgtttcagccaggcgtttgtcaaatcggatcgtgaaccgctggcaaccgccgcaccgctgctctatatgctcaacgatcatggcaagctgttgattcgcctcaatgaagatgagcggatgccggtcttctcgccggtttacagccgcagttcattgatgaccatgatgctctcagaagtgctgagccaggcgttaatgcagatcaacagcccggcgcagcgcctgaagatgagccacgccagccatccgcgtcgtttacgcaacgtgatcctgaccgtaccgccggcgatgccgaaaccagagcgcgccatttttgaagcctgcatgcatgacgctatccgcctggtgtggaaatcgctggagtgggaagagatggattacgacggcgaagagagcggcaatgcgaagcagccgcaccccggcgttcatgtgaagtgggatgaagcgacctgcggacagctggtctatctctataacgaaacgcagaccaatttcggtggccgcaccgatgagttttttgccgccacccgtcgccccgataatcagcaggcggaaggggaacaacgcagcctgaagatcgcctccatcgacattggcggcggcaccaccgatctggtgatcacccgctatacgctggatgacggtaaaggcattaacgtgcgtattacaccgaaacagctcttccgtgaaggcttcaaagtggcgggcgacgacattctgctggatgtcatccgtctctatctccagccagccgtaaaagcggcgatgatgaaagtcggccacagcgatatcgcggcagagtcgatgatgtcgcagctgttcggcagcgaagcgatcgaagcgggcaagcaggtgctgcgccagcagttgacgctgcaaatcttctcgccgctggcgctggccattcttcatcgatatgaagagtacaagccggagagtggccgcgaagtcctcaactataccttccgcgaactgctcaccggcactacgcctaccgccaaagtgcaggattacgttaacgacgtggtgcgcaccggccaactggcgaatgaagcgcccttctcactgctcgatgtgccgttagaggtcgatctcgcccgtctgcataatgagtttatcgatccacgcagcggccggatgaacatctgccatagcctgcgcgccctgtgtgaagtgctctggcactacaactgcgatgtgctgctgttaacgggacgcccttcacgcctgccgggcatccaggcgctgattcgccagctccagccggtgccgccgacgcgggttctgccgctgcacgggtatgaaaccggcggctggtatcccttcaacaaaaaagggtgcattgacgatccgaaatccaccgcggtggtcggcgcgatgctctgcctgctggcggagaagtcgcgtctcaacaacttctatttccgcgcggcaaactttaccgcctactcgacgatccgctacctcggcatgctggatggcaacaacgtcatcaaagacagcaacgtcttttacagcgatatcgacctcgatgccgctgacttccagctccctcagggcctgccatttgaggcgcgcggtgaagtgcgtatcggtttccgccagctggataacgagcggtggccggcctcgtcgctctataccctgaaaatcaacaatccgaaccttgccagcgaacttgccggcgatgcggtgatgcgtattgagctgatggcggaacagggccgcgcgcgaaacggcgaagaggctgtgagcccggagcgtttccgtattgaatcgctggagatggagaacgccagacgaaactacagccgcaaggatgtgaccttccagttaaacacgatggttggcaatggcatgggcgaaagccagtactggctggatagcgggagcattaagagctaa

SEQ ID NO: 1044 - DNA, 2667 bp, Kosakonia cowanii
  source 1..2667: mol_type = genomic DNA
atgaacagcatcaattcgaagcaaattatccagggctggcagggcgttgaacgcggtgccggtgaagcgattgagtggatcaacgcggtgcgccaggatgcgccgcgtcttaataccgaagccgaccgtctgacgattaacctccgccgcagccgtaacaaggcgcgccgtctggcgctggcagcggcaaaaccgatgaccatcggcttctttggcctgtcgcaggcgggcaaatcctacctgatttccgcgctggcggcgggtgaaaacggcaagctggagacccgcctcggcggtaaacagctcgattttctgacccacatcaacccgccgggcggtggcaaagaggcaaccggcctggtgacgcgctttagccgccgtcaggttggcggcgacgagcgctggccggtgacgctgcaactgtttagcgaaatcgagatgggcaaaattctcgccaacgcctttatccatgattttaatcaggaaaaatttgactggcagtatgacgaagggcgcatcaacgatctgctggcctcgctgaccaaacgacgtcgcccaacccgcgtggcgggcatcagtgaagatgatgtcgtctcgctgtgggattacctgagccgccatgcggaaaaaagccagagccgcttagcgctgcactactggccgcaggcgattacgctggcgccgtggctgacgccggaggatcgcggccagctcttctccgtgttatggggcgaggtggcagagctgaccgaagcctatatccgttttgcgcaaaccctgcatcggctgggcggcgcgcaggaagtgtgggcaccgttaagcacgctggtcagcgaagagaatggcctgctggtgcagcgcgacagcattatgaatgtcgacatgctggagcggctgaataaagagaccgatatccgcattgaggtctgcccggtggtggaaggcctggccgcagcgcccgttaccctgtcgctggcagaattaacggcattaaccgttgagttgcatatcccgctggtcgcctcgacccgcgagccgctgtttgaaaccgtcgatctgctcgattttcccggttatcgcggacgcctcggcgttgagtcgatggatgacattcgccgcgcggttaatagcgaagagagcaacccgctggcgcagctgattttacgtggcaaagtcgcttatctctttgagcgctataccgaaaaccaggagatgaacgtcctggtggtctgtacagcctcgaccaagcagtcggatgtgaaagaggtgggcggcgtgcttgatgagtggatccgctacacccagggcgccgacgccgaggcgcgcggccgccgtctgccggggctaatttgggcactcaccatgttcgatctgcgcatcagccaggggctgtcgcaagaggaggcaatcctgcgacaatcctgggggctgggcgggatgatcaaaatggcaatgaccgagcgcttcggtcagtacaaatggatgcaggagtggcagcgcggacaggcgtttaacaacaccttcctcgtgcgcaagccgcgccagcagacgccgtttattcgtattagcgacggtaacgaagcggcgtttagcgaagagaacctgccgcagctccagttgatgcgcaaaaccttccttgaagatgaagcggttaaccgctatatcgcctcgccggatgaagcctgggacgcgatgctcgagcttaacgacggcgggatgcgccgcatggctgattacctctcgaccgttgcgcgtccggaagtgaagctcgagcgcattgccgagcagttgcaggagatccgcgatgagctgatcgagggcggtttaggcaactggtatcagccagacggcgaagaggatgcggcgaaaaaggcgcagattgcccgcgacattctggatgtgctgaaaaaacgcagcggtatgcacggcgagctattgctgcgcctggtgccgacgcgccgcgatttgcaggcgctctatctgcaacaaaccacgttgccggtgcaggaagagacgcctgaagagctggatattttcgatatcggcgtcggcgctgcctttggggctgaagcacctgcggcaacgacctatagccacgaaattgccttcgcgcatcagagcgtgcagcactggatcaaccatctacgcggcttgtcggaaagcccggctttgctcaactacatcaatttaccgcgcccgattatcgacgcactggccgatgaactgattaccgccctgctccgtctgcgcgtcgaagagaagctcgttgaggcgatgaccaataccgagcaggcaggcgtgctgctggagcagatggtggaccgtcaggtgtcgcgcatcctgcatgtgatgggcgattttattacctggcttgggtacctcgagatacccgcagcgaaacgcccgacacgcttgaatatgccggatcagcacattttcacccgcccctctcagtgcgacagcgtggtgtggaaagacgacgagcgtctggcgcgtttaacgccgcaacaactgaactacaccgccatgttcattatcgactggctggtgggactggagtcgctgattaccgagaacgcgggccactcggccggacgggagatcagcgtggcgcagaacgaaaaactgggcgccatcatccgtcagattcagacttcacaggagtaa

SEQ ID NO: 1045 - DNA, 1281 bp, Kosakonia cowanii
  source 1..1281: mol_type = genomic DNA
atgataagaataacaaggatcgttaaaccttcagttgaattaaccgattatgccgcgtcattttcgccttttcgtacgctcctcgaaacctatttacccgcctctatccaaaatttatatgcccgcccggttatcgccgatgatggtgccgttgagtggtatagcgatattaatggtcagccgcgccgcttactcgatctgagtgaaaccgagcagagccgcgcccgcgcgctgctggaacagcgtctcgacagcgttcgggccctgcatcagaagctggcgcaaaacgggagcgagccagaaacaatgctgcgccagctacaggcggccacccactctcctgcacctgagcaggtgtgggtgatcgacggccatccggtcatcgtcccacctgcggagggcgccccccgcgccgctgatgccgccaccactgccgctgccgtctcaagccgtcgctggtggccgtggcttttacttctggcactgcttatcgccctgattctgttgctgctgtcacgctgttcgccactgcacgaaacagcagcatccgtcacgcccgtgccaccagctgtaacgcccggcgagccggtgaaacctgaaacgacacccgccccgcacgcgccggtaaaacccaccaaagcggtctgcccggcgcagcgaacccaacagcaagcccctgaaatggtggtaattatggacgcctccggttcgatggctatcaccatggatgccacgcaggatgagttgatcagctggaaccaggggaaatatgtcgagaatatcgaacgtgaaccgcgccgtatctcgctggcgcgaaacgcggccaaaggcattattgacactatcccgcgcgatatgaacatcagcctggtggcggcggaaaactgccgtcaggtctccctgtcgcccagcttcccgtttgcccagcgatcggcgctgaaaaagcgcattgaaggtattcaaccggtcggtaaaacgcctctcgccgaagccttagcactggcgggcaaaaaagtggatggggttaaccgcgatgcgattattttgctggtttccgacggagatgaaacctgcggcggcgatccctgccaggttgcccgcgagctgaaaaagagtaaaccgcgcctgcaggtgaatgtcgtcgatattatgagcaccggtgcaggaaattgtattgccagcagcaccggcggcaaagtttttgccgtcaacaatacccgggaatttaagcagatcatgaaaaaggcgatgcaagaatatattcctgagggctgcgaataa

SEQ ID NO: 1046 - DNA, 1407 bp, Kosakonia cowanii
  source 1..1407: mol_type = genomic DNA
gtgaaagagatgtttctgtgcagtgacaagctcaataaatatcagtcgatgggcgaaaacgggcaggctgtccatatttctgcgctgcagttgcgcgaaacccttcgcctgcgcaaacagagcgcggcggcagatgtgctcgccattccgcaaatcagtgaacacggcgaacgggttgactggtatgccccattttccggcgacgtcattccctggtcagcggccacggagagcgaacgtcaaagcgccttagcgcagctggaaaccacgcaggccacgttgcgccagctcagccaggatttcgcccagagcaaccagccggagcagcagctgtttggtaagctgctggaaaaaaccctgcaatttcccgatgccgagcatgtctggctggtcaacggcaagccggtgatcagcttctggggattcgtcaacgcccgccatcaggcacggatcgatccgctggactgcttacgtccgccgaaacccgttacgcccgcagccccgctgcacagcgcgccgccggtcaacgaaccgctggtgacgccgccgaagcgtcgcggatggtggatcctgcccgcgtggttatgctggctgctaccgctgctgctgttagcgcttctgctgctgtggctgctgcgcggctgcgtacccggcgtcaccattcctggctttagcgttgagcaaccggcactgcctgatgcgcaccttccggttgcggagaatggcgccaccctgcccgtcacctcctctgaacgtgttgttggcaccaccgaaggcgttactgcgccagtggtgagcggcagcacgacaggcatcgtcccgttgagcgatgaagagcgtgccacagctgccccggaaaacgccgccgcccttaacgatcctgccgtgccggtcgcgcctgaaacaggcagcgagcctgcgcaagctggcgttgagcccgtgacgccagaggcgcaggtgaacgacccggcgctggcggaacccaacgctactgcgggcaacgctaccgcgccggtagaggtgaaaaacccgttaagcctgccgccggaagcgctggcgcaggggcgtaccgatttcctcaatggccaatggcgcgcaggcgcaggcatccaggatcagcgtaccggcaagccgctgagcctcaactaccagattaaagatggcaaaggtgaagtgcagatggtgcgcggcgatggcgtctcctgccgcggcgcggtcaatgccgccatccaggccggcaagctggccattaataaccagggtgaagcgcaatgtaccgatggctcggtttaccagatgccggagatcgtctgtgcgcccggtgctaagagcgttgccgactgtaaaggcagctacggcaccagtacccttttccccctttcgatgaagcaggaggcaagtaactaa

SEQ ID NO: 1047 - DNA, 3003 bp, Kosakonia cowanii
  source 1..3003: mol_type = genomic DNA
atgctggctgagctcactgattttaaaaaacaggtcaaacttatccgtgacagcgggattcagttcctcgacttcgctttctccctgcccgcgcgtaaagcctacggcgaatttctgcgccagcagggcgaaggtgcggtgctgcgccttatctacaacgagcgtgacgacaagtttcaggtcccgacgccagacggcgaaacgccgcgcaacgccgaaccggagtatgcgctggcgattgaagattccctgagcctttatgcggggatctggttgccgctgcccttctttcgcttcaacccgccgggcggcttttctcacgggccgactaactggtcgcgcgtgcagtttcatcaactgccggagccggacgagaaaggcaacacctggcgtgcaacgctgattttcgataccaaaatctttcccgaccgcgaacatacacaatacctggcacccggcgaagatgatgtccgttccggggccggttttgcgctggcctgcttgccgcaccagatgggcgacttcctgactcttccatggattgaggagtggctgaacgatatctataccaggcaggcacacgctgtgctgcgtcagcaccccgaagacaccgaagagaagctggggctgaaagagcatcaggcgcacttccttaacctgctcgaggtgctgaaaaagaccatcgccattccagaagtacagctcaatgacgtgaaaattcgtgataccgcgatccccgtcgacctggtgctggatattggcaactcacgcagctgcggcgtgctgattgaggagcatgcagcagataacaaaggcctctcccagctttatcagctgcaattgcgcgatctgagccagccgcagtttgtctataacgagccatttgagagccgactggagttcgcgcaggcggagtttggcaagcaggacttctcatcgaaaagcgggcgcagcgacgcctttacctggccgaccatcggccgcgtcggcggtgaggctttccgcatggcggcgcagcgtttaggtaccgaaggctcaaccggcctctccagcccgaaacgctatctgtgggacgatcagccctactcgccgggctggcgtttcagccaggcgtttgtcaaatcggatcgtgaaccgctggcgaccgccgccccgctgctctatatgctcaatgatcatggcaagctgttgattcgcctcaatgaagatgagcggatgccggtcttctcgccggtttacagccgcagttcattgatgaccatgatgctctcagaggtgctgagccaggcgttaatgcagatcaacagcccggcgcagcgcctgaagatgagccacgccagccatccacgtcgtttacgcaacgtgatcctgaccgtgccgccggcgatgccgaaaccagagcgcgccatctttgaagcctgcatgcatgacgctatccgcctggtgtggaaatcgctggagtgggaagagatggattacgacggcgaagagagcggcaatgcgaagcagccgcaccccggcgttcatgtgaagtgggatgaagcgacctgcggacagctggtctatctctataacgaaacgcagaccaatttcggtggccgcaccgatgagttttttgccgccacccgtcgccccgataatcagcaggcggagggggaacaacgcagcctgaagatcgcctcgatcgacattggcggtggcaccaccgatctggtaatcacccgctatacgctggatgacggtaaaggcattaacgtgcgcattacaccgaaacagctcttccgcgaaggctttaaagtggcgggcgacgacattctgctggatgtcatccgtctctatctccagccagccgtaaaagcggcgatgatgaaagtcggccacagcgatatcgcggcagagtcgatgatgtcgcagctgttcggcagtgaagcgatcgaagcgggcaagcaggtgctgcgccagcagttgacgctgcaaatcttctcaccgctggcgctggccattcttcatcgctatgaagagtacaagccggagagtggccgcgaagtcctcaactataccttccgcgaactgctcaccggcactacgcctaccgccaaagtgcaggattacgttaacgacgtggtgcgcaccggccagttggcgagcgaagcgctcttctcactgctcgatgtgccgttagaggtcgatctcgcccgtctgcataatgagtttatcgatccgcgcagcggccggatgaacatctgccatagcctgcgcgccctgtgtgaagtgctctggcactacaactgcgatgtgctgctgttaacgggccgcccttcacgcctgccgggcatccaggcactgattcgccagctccagccggtgccgccgacgcgggttctgccgctgcacgggtatgaaaccggcggctggtatcccttcaacaaaaaagggtgcattgacgatccgaaatccaccgcggtggtcggcgcgatgctctgcctgctggcggagaagtcgcgtctcaacaacttctatttccgcgcggcaaactttaccgcctactcgacgatccgctacctcggcatgctggatggcaacaacgtcatcaaagacagcaacgtcttttacagcgatatcgacctcgatgccgctgacttccagctccctcagggcctgccatttgaggcgcgcggtgaagtgcgtatcggtttccgtcagctggataacgagcgctggccggcctcgtcgctctataccctgaaaatcaacaatccgaaccttgccagcgaactcgccggcgatgcggtgatgcgtattgagctgatggcggaacagggccgcgcgcgaaacggcgaagaggcggtcagcccggagcgtttccgtattgagtcgctggagatggagaacgccagacgaaactacagccgcaaggacgtgaccttccagttaaacacgatggttggcaatggcatgggcgaaagccagtactggctggatagcgggagcattaagagctaa

SEQ ID NO: 1048 - DNA, 2667 bp, Kosakonia cowanii
  source 1..2667: mol_type = genomic DNA
atgaacagcatcaattcgaagcaaattatccagggctggcagggcgttgaacgcggtgccggtgaagcgattaagtggatcaacgcggtgcgccaggatgcgccgcgtcttaataccgaagccgaccgtctgacgattaacctccgccgcagccgtaacaaggcgcgccgtctggcgctggcagcagcaaaaccgatgaccatcggcttctttggcctgtcgcaggcgggcaaatcctacctgatttccgcactggcggcgggtgaaaacggcaagctggagacccgcctcggcggtaagcagctcgattttctgacccacatcaacccgccgggcggcggcaaagaggcaaccggcctggtgacgcgctttagccgtcgccaggttggcggcgacgagcgctggccggtgacgctgcaactgtttagcgaaattgagatgggcaaaattctcgccaacgcctttatccatgattttaatcaggaaaaattcgactggcagtatgacgaagggcgcatcaacgatctgctggcctcgctgaccaaacgccgtcgcccaacccgcgtggcgggcatcagtgaagatgatgtcgtctcgctgtgggattacctgagccgccatgcggaaaaaagccagagccgcttagcgctgcactactggccgcaggcgattacgctggcgccgtggctgacgccggaggatcgcggccagctcttctcggtgttatggggcgaggtggcagagctgaccgaagcctatatccgttttgcgcaaaccctgcatcggctgggcggcgcacaggaagtgtgggcaccgttaagcacgctggtcagcgaagagaatggtctgttggtgcagcgcgacagcattatgaatgtcgacatgctggagcggctgaataaagagaccgatatccgcattgaggtctgcccggtggtggagggccaggccgcagcgcccgtcaccctctcgctggcagaattaacggcattaaccgttgagttgcatattccgctggtcgcctcgacccgcgagccgctgtttgagaccgtcgatctgctcgatttccccggttatcgcgggcgcctcggcgttgagtcgatggatgatattcgccgcgcggtcaacagtgaagagagcaacccgctggcgcagctgattttacgtggcaaagtcgcttatctctttgagcgctataccgaaaaccaggagatgaacgtcctggtggtctgtacggcttccaccaagcagtcggatgttaaagaggtgggcggcgtgctcgatgagtggatccgctacacccagggcgccgacgccgaggcgcgcggccgccgtctgccggggctaatttgggcgctgaccatgttcgatctgcgcatcagccaggggctgtcgcaagaggaggcaatcctgcgacaatcctgggggctgggcgggatgatcaaaatggcaatgaccgagcgcttcggtcagtacaaatggatgcaggagtggcagcgcggacaggcgtttaacaacactttccttgtgcgcaagccgcgccagcagacgccgtttattcgtattagcgacggtaacgaagcggcgtttagcgaagagaacctgccgcagctccagttgatgcgcaaaaccttccttgaagatgaagcggttaaccgctatatcgcctcgccggatgaagcctgggacgcgatgctcgagcttaacgacggcgggatgcgccgtatggctgattacctctcgaccgttgcgcgtcaggaagtgaagctcgagcgcattgccgagcagttgcaggagatccgcgatgagctgatcgagggcggtttaggcaactggtatcagccagacggcgaagaggatgcggcgaaaaaggcgcagattgcccgcgacattctggatgtgctgaaaaaacgcagcggtatgcacggcgagctgttgctgcgcctggtgccgacgcgccgcgatttgcaggcactctatctgcaacaaaccacactgccggtgcaggaagaggcacctgaagagctggatattttcgatatcggtgttggcgctgcctttggggctgaagcacctgcggcaacgacctatagccacgaaattgccttcgcgcatcagagcgtgcagcactggatcaaccatctacgcggcttgtcggaaagcccggcgttgctcaactacatcaatttaccgcgcccgattatcgacgcgctggccgatgaactgattaccgccctgctccgtctgcgcatcgaagagaagctcgttgaagcgatgaccaataccgagcaggcaggcgtgttgctggagcagatggtggaccgtcaggtgtcgcgcatcctgcatgtgatgggcgattttattacctggcttgggtacctcgagatgcccgcagcgaaacgcccgacacgcttgaatatgccggatcagcacattttcacccgcccctctcagtgcgacagcgtggtgtggaaagacgacgagcgcctggcgcgtttaacgccgcaacaactgaactacaccgccatgttcattatcgactggctggtgggactggagtcgctgattaccgagaacgcgggccattcggccggtcgggagatcagcgtggcgcagaacgaaaaactgggcgccatcatccgtcagattcagacttcacaggagtaa

SEQ ID NO: 1049 - DNA, 1281 bp, Kosakonia cowanii
  source 1..1281: mol_type = genomic DNA
atgataagaataacaaggatcgttaaaccttcagttgaattaaccgattatgccgcgtcattttcgccttttcgtacgctcctcgaaacctatttacccgcctctatccaaaatttatatgcccgcccggttatcgccgatgatggtgccgttgagtggtatagcgatattaatggtcagccgcgccgcttactcgatctgagtgaaaccgagcagagccgcgcccgcgcggtgctggaacagcgtctcgacagcgttcgggccctgcatcagaagctggcgcaaagcgggagcgagccagaaacaatgctgcgcctgctacaggcggccacccactctcctgcacctgagcaggtgtgggtgatcgacggccatccggtcatcgtcccacctgcggagggcgccccccgcgccgctgctgccgccaccactgccgctgccgtctcaagccgtcgctggtggccgtggcttttacttctggcactgcttatcgccctgattctgttgctgctgtcacgctgttcgccactgcacgaaacagcagcacccgtcacgcccgcgccaccagctgtaacgcccggcgagccggtgaaacctgaaaagacacccgccccgcacgcgccggtaaaacccaccaaagcggtctgcccggcgcagcgaacccaacagcaagcccctgaaatggttgtgattatggacgcctccggttcgatggccatcaccatggatgccacgcaggatgagttgatcagctggaaccaggggaaatatgtcgagaatatcgaacgtgaaccgcgccgtatctcgctggcgcgtaacgcggccaaaggcattattgacactatcccgcgcgatatgaacatcagcctggtggcggcggaaaactgccgtcaggtctccctgtcgcccagcttcccgtttgcccagcgatcggcgctgaaaaagcgcattgaaggtattcaaccggtcggtaaaacgcctctcgccgaagccttagcactggcgggcaaaaaagtggatggggttaaccgcgatgcgattattttgctggtttccgacggagatgaaacctgcggcggcgatccctgccaggttgcccgcgagctgaaaaagagtaaaccgcgcctgcaggtgaatgtcgtcgatattatgagcaccggtgcaggaaattgtattgccagcagcaccggcggcaaagtttttgccgtcaacaatacccgggaatttaagcagatcatgaaaaaggcgatgcaagaatatattcctgagggctgcgaataa

SEQ ID NO: 1050 - DNA, 1281 bp, Kosakonia cowanii
  source 1..1281: mol_type = genomic DNA
atgataagaataacaaggatcgttaaaccttcagttgaattaaccgattatgccgcgtcattttcgccttttcgtacgctcctcgaaacctatttacccgcctctatccaaaatttatatgcccgcccggttatcgccgatgatggtgccgttgagtggtatagcgatattaatggtcagccgcgccgcttactcgatctgagtgaaaccgagcagagccgcgcccgcgcggtgctggaacagcgtctcgacagcgttcgggccctgcatcagaagctggcgcaaagcgggagcgagccagaaacaatgctgcgcctgctacaggcggccacccactctcctgcacctgagcaggtgtgggtgatcgacggccatccggtcatcgtcccacctgcggagggcgcgccccgcgccgctgctgccgccaccactgccgctgccgtctcaagccgtcgctggtggccgtggcttttacttctggctctgcttatcgccctgattctgttgctgctgtcacgctgttcgccactgcacgaaacagcagcacccgtcacgcccgtgccaccagctgtaacgcccggcgagccggtgaaacctgaaacgacacccgccccgcacgcgccggtaaaacccaccaaagcggtctgcccggcgcagcgaacccaacagcaagcccctgaaatggtggtaattatggacgcctccggttcgatggctatcaccatggatgccacgcaggatgagttgatcagctggaaccaggggaaatatgtcgagaatatcgaacgtgaaccgcgccgtatctcgctggcgcgaaacgcggccaaaggcattattgacactatcccgcgcgatatgaacatcagcctggtggcggcggaaaactgccgtcaggtctccctgtcgcccagcttcccgtctgcccagcgatcggcgctgaaaaagcggattgaaggtattcaaccggtcggtaaaacgcctctcgccgaagccttagcactggcgggcaaaaaagtggatggggttaaccgcgatgcgattattttgctggtttccgacggagatgaaacctgcggcggcgatccctgccaggttgcccgcgagctgaaaaagagtaaaccgcgcctgcaggtgaatgtcgtcgatattatgagcaccggtgcaggaaattgtattgccagcagcaccggcggcaaagtttttgccgtcaacaatacccgggaatttaagcagatcatgaaaaaggcgatgcaagaatatattcctgagggctgcgaataa

SEQ ID NO: 1051 - DNA, 1407 bp, Kosakonia cowanii
  source 1..1407: mol_type = genomic DNA
gtgaaagagatgtttctgtgcagtgacaagctcaataaatatcagtcgatgggcgaaaacgggcaggctgtccatatttctgcgctgcagttgcgcgaaacccttcgcctgcgcaaacagagcgcggcggcagatgtgctcgccattccgcaaatcagtgaacacggcgaacgggttgactggtatgccccattttccggcgacgtcattccctggtcagcggccacggagagcgaacgtcaaagcgccttagcgcagctggaaaccacgcaggccacgttgcgccagctcagccaggatttcgcccagagcaaccagccggagcagcagctgtttggtaagctgctggaaaaaaccctgcaatttcccgatcccgagcatgtctggctggtcaacggcaagccggtgatcagcttctggggattcgtcaacgcccgccatcaggcacggatcgatccgctggactgcttacgtccgccgaaacccgttacgcccgcagccccacttcacagcgcgccgccggtcaacgaaccgctggtgacgccgccgaagcgtcgcggatggtggatcctgcccgcgtggttatgctggctgctaccgctgctgctgttagcgcttctgctgctgtggctgctgcgcggctgcgtacccggcgtcaccattcctggctttagcgttgagaaaccagcactgcctgatgcgcaccttccggttgcggagaatggcgccaccctgcccgtcacctcctctgaacgtgttgttggcaccaccgaaggcgttactgcgccagtggtgagcggcagcacgacgggcatcggcccattgagtgatgaagagcgtgccacagctgccccggaaaacgccgccgcccttaacgatcccgccgtgccggtcgcgcctgaaacaggcagcgagcctgcgcaagctggcgttgagcccgtgacgccagaggcgcaggtgaacgacccggcgctggcggaacccaacgctactgcgggcaacgctaccgcaccggtagaggtgaaaaacccgttaagcctgccgccggaagcgctggcgcaggggcgtaccgatttcctcaatggccaatggcgcgcaggcgcaggcatccaggatcagcgtaccggcaagccgctgagcctcaactaccagattaaagatggcaaaggtgaagtgcagatggtgcgcggcgatggcgtctcctgccgcggtgcggtcaatgccgcaatccaggccggcaagctggccattaataaccagggtgaagcgcaatgtaccgatggctcggtttaccagatgccggagatcgtctgtgcgcccggtgctaagagcgttgccgactgtaaaggcagctacggcaccagtacccttttccccctttcgatgaagcaggaggcaagtaactaa

SEQ ID NO: 1052 - DNA, 3003 bp, Kosakonia cowanii
  source 1..3003: mol_type = genomic DNA
atgctggctgagctcactgattttaaaaaacaggtcaaacttatccgtgacagcgggattcagttcctcgacttcgctttctccctgcccgcgcgtaaagcctacggcgaatttctgcgccagcagggcgaaggtgcagtgctgcgccttatctacaacgagcgtgacgacaagtttcaggtcccgacgccagacggcgaaacgccgcgcaacgccgaaccggagtatgcgctggcgattgaagattccctgagcctttatgcagggatctggttgccgctgcccttctttcgcttcaacccgccgggcggcttttctcacgggccgactaactggtcgcgcgtgcagtttcatcaactgccggagccggacgagaaaggcaacacctggcgtgcaacgctgattttcgataccaaaatctttcccgaccgcgaacatacacaatacctggcacccggcgaagatgatgtccgttccggggccggttttgcgctggcctgcttaccgcaccagatgggcgacttcctgactcttccatggattgaggagtggctgaacgatatctataccaggcaggcgcacgctgtgctgcgtcagcaccctgaagacaccgaagagaagctggggctgaaagagcatcaggcgcacttccttaacctgctcgaggtgctgaaaaagaccatcgtcattccagaagtacagctcaatgacgtgaaaattcgtgataccgcgatccccgtcgacctggtgctggatattggcaactcacgcagctgcggcgtgctgattgaggagcatgcggcggataacaaaggcctctcccagctttatcagctgcaattgcgcgatctgagccagccgcagtttgtctataacgagccgtttgaaagccgactggagttcgcgcaggcggagtttggcaagcaggacttctcatcgaaaagcgggcgcagcgacgcctttacctggccgaccatcggccgcgtcggcggtgaggctttccgcatggcggcgcagcgtttaggtaccgaaggctcaaccggcctctccagcccgaaacgctatctgtgggacgatcagccctactcgccgggctggcgtttcagccaggcgtttgtcaaatcggatcgtgaaccgctggcgaccgccgccccgctgctctatatgctcaatgatcatggcaagctgttgattcgcctcaatgaagatgagcggatgccggtcttctcgccggtttacagccgcagttcattgatgaccatgatgctctcagaggtgctgagccaggcgttaatgcagatcaacagcccggcgcagcgcctgaagatgagccacgccagccatccacgtcgtttacgcaacgtgatcctgaccgtgccgccggcgatgccgaaaccagagcgcgccatctttgaagcctgcatgcatgacgctatccgcctggtgtggaaatcgcttgagtgggaagagatggattacgacggcgaagagagcggcaatgcgaagcagccgcaccccggcgttcatgtgaagtgggatgaagcgacctgcggacagctggtctatctctataacgaaacgcagaccaatttcggtggccgcaccgatgagttttttgccgccacccgtcgccccgataatcagcaggcggagggggaacaacgcagcctgaagatcgcctcgatcgacattggcggtggcaccaccgatctggtaatcacccgctatacgctggatgacggtaaaggcattaacgtgcgtattacaccgaaacagctcttccgcgaaggctttaaagtggcgggcgacgacattctgctggatgtcatccgtctctatctccagccagccgtaaaagcggcgatgatgaaagtcggccacagcgatatcgcggcagagtcgatgatgtcgcagctgttcggtagtgaagcgatcgaagcgggcaagcaggtgctgcgccagcagttgacgctgcaaatcttctcaccgctggcgctggccattcttcaccgctatgaagagtacaagccggagagtggccgcgaagtcctcaactataccttccgcgaactgctcaccggcactacgcctaccgccaaagttcaggattacgttaacgacgtggtgcgcaccggccagttggcgagcgaagcgcttttctcactgctcgacgtgccgttagaggtcgatctcgcccgtctgcataatgagtttatcgatccgcgcagcggccggatgaacatctgccatagcctgcgcgccctgtgtgaagtgctctggcactacaactgcgatgtgctgctgttaacgggccgcccttcgcgcctgccgggcattcaggcgctgattcgccagctccagccggtgccgccgacgcgggttctgccgctgcacgggtatgaaaccggcggctggtatcccttcaacaaaaaagggtgcattgacgatccgaaatccaccgcggtggtcggcgcgatgctctgcctgctggcggagaagtcgcgtctcaacaacttctatttccgcgcggcaaactttaccgcctactcgacgatccgctacctcggcatgctggatggcaacaacgtcatcaaagacagcaacgtcttttacagcgatatcgacctcgatgccgctgacttccagctgcctcagggccagccatttgaggcgcgcggtgaagtgcgtatcggtttccgccagctggataacgagcgctggccggcctcgtcgctctataccctgaaaatcaacaatccgaaccttgccagcgaactcgccggcgatgcggtgatgcgtattgagctgatggcggaacagggccgcgcgcgaaacggcgaagaggcggtcagcccggagcgtttccgtattgagtcgctggagatggagaacgccagacgaaactacagccgcaaggacgtgaccttccagttaaacacgatggttggcaatggcatgggcgaaagccagtactggctggatagcgggagcattaagagctaa

SEQ ID NO: 1053 - DNA, 2667 bp, Kosakonia cowanii
  source 1..2667: mol_type = genomic DNA
atgaacagcatcaattcgaagcaaattatccagggctggcagggcgttgaacgcggtgccggtgaagcgattgagtggatcaacgcggtgcgccaggatgcgccgcgtcttaataccgaagccgaccgtctgacgattaacctccgccgcagccgtaacaaggcgcgccgtctggcgctggcagcggcaaaaccgatgaccatcggcttctttggcctgtcgcaggcgggcaaatcctacctgatttccgcgctggcggcgggtgaaaacggcaagctggagacccgcctcggcggtaagcagctcgattttctgacccacatcaacccgccgggcggtggcaaagaggcaaccggcctggtgacgcgctttagccgccgtcaggttggcggcgacgagcgctggccggtgacgctgcaactgtttagcgaaatcgagatgggcaaaattctcgccaacgcctttatccatgattttaatcaggaaaaatttgactggcagtatgacgaagggcgcatcaacgatctgctggcctcgctgaccaaacgctgtcgcccaacccgcgtggcgggcatcagtgaagatgatgtcgtctcgctgtgggattacctgagccgccatgcggaaaaaagccagagccgtttagcgctgcactactggccgcaggcgattacgctggcaccgtggttgacgccggaggatcgcggtcagctcttctcggtgttatggggcgaggtcgcagagttgaccgaagcctatatccgtttcgcgcaaaccctgcaccggctgggcggcgcgcaggaagtgtgggcgccgttaagcacgctggtcagtgaagagaatggcctgctggtgcagcgcgacagcattatgaatgtcgacatgctggagcggctgaacaaagagaccgatatccgcattgaggtctgcccggtggtggaaggccaggctgcagcgcccgtcaccctctcgctggcagaattaacggcattaaccgttgagttgcatatcccgctggtcgcctcgacccgcgagccgctgtttgagaccgtcgatctgctcgatttccccggttatcgcgggcgcctcggcgttgagtcgatggatgatattcgccgcgcggtcaacagtgaagagagcaacccgctggcgcagctgattttacgtggaaaagtcgcttatctctttgagcgctataccgaaaaccaggagatgaacgtcctggtggtctgtacggcttccaccaagcagtcggatgtgaaagaggtgggcggcgtgctcgatgagtggatccgctacacccagggcgccgacgccgaggcgcgcggccgccgtctgccggggctaatttgggcgctgaccatgttcgatctgcgcatcagccaggggctgtcgcaagaggaggcaatcctgcgacaatcctgggggctgggcgggatgatcaaaatggcaatgaccgagcgcttcggtcagtacaaatggatgcaggagtggcagcgcggacaggcgtttaacaacaccttccttgtgcgcaagccgcgccagcagacgccgtttattcgtattagcgacggtaacgaagcggcgtttagcgaagagaacctgccgcagctccagctaatgcgcaaaaccttccttgaagatgaagcggttaaccgctatatcgcctcgccggatgaagcctgggacgcgatgctcgagcttaacgacggcgggatgcgccgcatggctgattacctctcaaccgttgcgcgtccggaagtgaagctcgagcgcattgccgagcagttgcaggagatccgcgatgagctgatcgagggcggtttaggcaactggtatcagccagacggcgaagaggatgcggcgaaaaaggcgcagattgcccgcgacattctggatgtgctgaaaaaacgcagcggtatgcacggcgagctgttgctgcgcctggtgccgacgcgccgcgatttgcaggcactctatctgcaacaaaccacactgccggtgcaggaagaggcgcctgaagagctggatattttcgatatcggtgttggcgcagcctttggggctgaagcacctgcggcaacgacctatagccacgaaattgccttcgcgcatcagagcgtgcagcactggatcaaccatctacgcggcttgtcggaaagcccggcgttgctcaactacatcaatttaccgcgcccgattatcgacgcgctggccgatgaactgattaccgccctgctccgtctgcgcgtcgaagagaagctcgttgaggcgatgaccaataccgagcaggcaggcgtgctgctggagcagatggtggatcgtcaggtgtcgcgcatcctgcatgtgatgggcgattttattacctggcttgggtacctcgagatacccgcagcgaaacgcccgacacgcttgaatatgccggatcagcacattttcacccgcccctctcagtgcgacagcgtggtgtggaaagacgacgagcgcctggcgcgtttaacgccgcaacaactgaactacaccgccatgttcattatcgactggctggtgggactggagtcgctgattaccgagaacgcgggccactcggccggacgggagatcagcgtggcgcagaacgaaaaactgggcgccatcatccgtcagattcagacttcacaggagtaa

SEQ ID NO: 1054 - DNA, 1281 bp, Kosakonia cowanii
  source 1..1281: mol_type = genomic DNA
atgataagaataacaaggatcgttaaaccttcagttgaattaaccgattatgccgcgtcattttcgccttttcgtacgctcctcgaaacctatttacccgcctctatccaaaatttatatgcccgcccggttatcgccgatgatggtgccgttgagtggtatagcgatattaatggtcagccgcgccgcttactcgatctgagtgaaaccgagcagagccgcgcccgcgcgctgctggaacagcgtctcgacagcgttcgggccctgcatcagaagctggcgcaaagcgggagcgagccagaaacaatgctgcgcctgctacaggcggccacccactctcctgcacctgagcaggtgtgggtgatcgacggccatccggtcatcgtcccacctgcggagggcgcgccccgcgccgctgctgccgccaccactgccgctgccgtctcaagccgtcgctggtggccgtggcttttacttctggctctgcttatcgccctgattctgttgctgctgtcacgctgttcgccactgcacgaaacagcagcacccgtcacgcccgtgccaccagctgtaacgcccggcgagccggtgaaacctgaaacgacacccgccccgcacgcgccggtaaaacccaccaaagcggtctgcccggcgcagcgaacccaacagcaagcccctgaaatggtggtaattatggacgcctccggttcgatggctatcaccatggatgccacgcaggatgagttgatcagctggaaccaggggaaatatgtcgagaatatcgaacgtgaaccgcgccgtatctcgctggcgcgaaacgcggccaaaggcattattgacactatcccgcgcgatatgaacatcagcctggtggcggcggaaaactgccgtcaggtctccctgtcgcccagcttcccgtctgcccagcgatcggcgctgaaaaagcggattgaaggtattcaaccggtcggtaaaacgcctctcgccgaagccttagcactggcgggcaaaaaagtggatggggttaaccgcgatgcgattattttgctggtttccgacggagatgaaacctgcggcggcgatccctgccaggttgcccgcgagctgaaaaagagtaaaccgcgcctgcaggtgaatgtcgtcgatattatgagcaccggtgcaggaaattgtattgccagcagcaccggcggcaaagtttttgccgtcaacaatacccgggaatttaagcagatcatgaaaaaggcgatgcaagaatatattcctgagggctgcgaataa

SEQ ID NO: 1055 - DNA, 1407 bp, Kosakonia cowanii
  source 1..1407: mol_type = genomic DNA
gtgaaagagatgtttctgtgcagtgacaagctcaataaatatcagtcgatgggcgaaaacgggcaggctgtccatatttctgcgctgcagttgcgcgaaacccttcgcctgcgcaaacagagcgcggcggcagatgtgctcgccattccgcaaatcagtgaacacggcgaacgggttgactggtatgccccattttccggcgacgtcattccctggtcagcggccacggagagcgaacgtcaaagcgccttagcgcagctggaaaccacgcaggccacgttgcgccagctcagccaggatttcgcccagagcaaccagccggagcagcagctgtttggtaagctgctggaaaaaaccctgcaatttcccgatcccgagcatgtctggctggtcaacggcaagccggtgatcagcttctggggattcgtcaacgcccgccatcaggcacggatcgatccgctggactgcttacgtccgccgaaacccgttacgcccgcagccccacttcacagcgcgccgccggtcaacgaaccgctggtgacgccgccgaagcgtcgcggatggtggatcctgcccgcgtggttatgctggctgctaccgctgctgctgttagcgcttctgctgctgtggctgctgcgcggctgcgtacccggcgtaaccattcctggctttagcgttgagcaaccggcactgcctgatgcgcaccttccggttgcggagaatggcgccaccctgcccgtcacctcctctgaacgtgttgttggcaccaccgaaggcgttactgcgccagtggtgagcggcagcacgacaggcatcgtcccgttgagcgatgaagagcgtgccacagctgccccggaaaacgccgccgcccttaacgatcctgccgtgccggtcgcgcctgaaacaggcagcgagcctgcgcaagctggcgttgagcccgtgacgccagaggcgcaggtgaacgacccggcgctggcggaacccaacgctactgcggacaacgctaccgcaccggtagaggtgaaaaacccgttaagcctgccgccggaagcgctggcgcaggggcgtaccgatttcctcaatggccaatggcgcgcaggcgcaggcatccaggatcagcgtaccggcaagccgctgagcctcaactaccagattaaagatggcaaaggtgaagtgcagatggtgcgcggcgatggcgtctcctgccgcggtgcggtcaatgccgcaatccaggccggcaagctggccattaataaccagggtgaagcgcaatgtaccgatggctcggtttaccagatgccggagatcgtctgtgcgcccggtgctaagagcgttgccgactgtaaaggcagctacggcaccagtacccttttccccctttcgatgaagcaggaggcaagtaactaa

SEQ ID NO: 1056 - DNA, 3003 bp, Kosakonia cowanii
  source 1..3003: mol_type = genomic DNA
atgctggctgagctcactgattttaaaaaacaggtcaaacttatccgtgacagcgggattcagttcctcgacttcgctttctccctgcccgcgcgtaaagcctacggcgaatttctgcgccagcagggcgaaggtgcggtgctgcgccttatctacaacgagcgtgacgacaagtttcaggtcccgacgccagacggcgaaacgccgcgcaacgccgaaccggagtatgcgctggcgattgaagattccctgagcctttatgcggggatctggttgccgctgcccttctttcgcttcaacccgccgggcggcttttctcacgggccgactaactggtcgcgcgtgcagtttcatcaactgccggagccggacgagaaaggcaacacctggcgtgcaacgctgattttcgataccaaaatctttcccgaccgcgaacatacacaatacctggcacccggcgaagatgatgtccgttccggggccggttttgcgctggcctgcttgccgcaccagatgggcgacttcctgactcttccatggattgaggagtggctgaacgatatctataccaggcaggcacacgctgtgctgcgtcagcaccccgaagacaccgaagagaagctggggctgaaagagcatcaggcgcacttccttaacctgctcgaggtgctgaaaaagaccatcgccattccagaagtacagctcaatgacgtgaaaattcgtgataccgcgatccccgtcgacctggtgctggatattggcaactcacgcagctgcggcgtgctgattgaggagcatgcagcagataacaaaggcctctcccagctttatcagctgcaattgcgcgatctgagccagccgcagtttgtctataacgagccatttgagagccgactggagttcgcgcaggcggagtttggcaagcaggacttctcatcgaaaagcgggcgcagcgacgcctttacctggccgaccatcggccgcgtcggcggtgaggctttccgcatggcggcgcagcgtttaggtaccgaaggctcaaccggcctctccagcccgaaacgctatctgtgggacgatcagccctactcgccgggctggcgtttcagccaggcgtttgtcaaatcggatcgtgaaccgctggcgaccgccgccccgctgctctatatgctcaatgatcatggcaagctgttgattcgcctcaatgaagatgagcggatgccggtcttctcgccggtttacagccgcagttcattgatgaccatgatgctctcagaagtgctgagccaggcgttaatgcagatcaacagcccggcgcagcgcctgaagatgagccacgccagccatccacgtcgtttacgcaacgtgatcctgaccgtgccgccggcgatgccgaaaccagagcgcgccatctttgaagcctgcatgcatgacgctatccgcctggtgtggaaatcgctggagtgggaagagatggattacgacggcgaagagagcggcaatgcgaagcagccgcaccccggcgtgcatgtgaagtgggatgaagcgacctgcggacagctggtctatctctataacgaaacgcagaccaattttggtggccgcaccgatgagttttttgccgccacccgtcgccccgataatcagcaggcggagggggaacaacgcagcctgaagatcgcctccatcgacattggcggtggcaccaccgatctggtgatcacccgctatacgctggatgacggtaaaggcattaacgtgcgcattacaccgaaacagctcttccgcgaaggctttaaagtggcgggcgacgacattctgctggatgtcatccgtctctatctccagccagccgtaaaagcggcgatgatgaaagtcggccacagcgatatcgcggcagagtcgatgatgtcgcagctcttcggcagtgaagcgatcgaagcgggcaagcaggtgctgcgccagcagttgacgctgcaaatcttctcaccgctggcgctggccattcttcatcgctatgaagagtacaagccggagagtggccgcgaagtcctcaactataccttccgcgaactgctcaccggcactacgcctaccgccaaagtgcaggattacgttaacgacgtggtgcgcaccggccagttggcgagcgaagcgctcttctcactgctcgacgtgccgttagaggtcgatctcgcccgtctgcataatgagtttatcgatccgcgcagcggccggatgaacatctgccatagcctgcgcgccctgtgtgaagtgctctggcactacaactgcgatgtgctgctgttaacgggccgcccttcacgcctgccgggcatccaggcactgattcgccagctccagccggtgccgccgacgcgggttctgccgctgcacgggtatgaaaccggcggctggtatcccttcaacaaaaaagggtgcattgatgatccgaaatccaccgcggtggtcggcgcgatgctctgcctgctggcggagaagtcgcgtctcaacaacttctatttccgcgcggcaaactttaccgcctactcgacgatccgctacctcggcatgctggatggcaacaacgtcatcaaagacagcaacgtcttttacagcgatatcgacctcgatgccgctgacttccagctccctcagggccagccatttgaggcgcgcggtgaagtgcgtatcggtttccgccagctggataacgagcgctggccggcctcgtcgctttataccctgaaaatcaacaatccgaaccttgccagcgaactcgccggcgatgcggtgatgcgtattgagctgatggcggaacagggccgcgcgcgaaacggcgaagaggcggtcagcccggagcgtttccgtattgagtcgctggagatggagcacgccagacgaaactacagccgcaaggacgtgaccttccagttaaacacgatggttggcaatggcatgggcgaaagccagtactggctggatagcgggagcattaagagctaa

SEQ ID NO: 1057 - DNA, 2667 bp, Kosakonia cowanii
  source 1..2667: mol_type = genomic DNA
atgaacagcatcaattcgaagcaaattatccagggctggcagggcgttgaacgcggtgccggtgaagcgattgagtggatcaacgcggtgcgccaggatgcgccgcgtcttaataccgaagccgaccgtctgacgattaacctccgccgcagccgtaacaaggcgcgccgtctggcgctggcagcagcaaaaccgatgaccatcggcttctttggcctgtcgcaggcgggcaaatcctacctgatttccgcgctggcggcgggtgaaaacggcaagctggagacccgcctcggcggtaagcagctcgattttctgacccacatcaacccgccgggcggcggcaaagaggcaaccggcctggtgacgcgttttagccgtcgtcaggttggcggcgacgagcgctggccggtgacgctgcaactgtttagcgaaatcgagatgggcaaaattctcgccaacgcctttatccatgattttaatcaggaaaaatttgactggcagtatgacgaagggcgcatcaacgatctgctggcctcgctgaccaaacgccgtcgcccaacccgcgtggcgggcatcagtgaagatgatgtcgtctcgctgtgggattacctgagccgccatgcggaaaaaagccagagccgcttagcgctgcactactggccgcaggcgattacgctggcaccgtggttgacgccggaggatcgcggccagctcttctcggtgttatggggcgaggtggcagagctgaccgaagcctatatccgtttcgcgcaaaccctgcatcggctgggcggcgcgcaggaagtgtgggcaccgttaagcacgctggtcagcgaagagaatggcctgctggtgcagcgcgacagcattatgaatgtcgacatgctggagcggctgaataaagagaccgatatccgcattgaggtctgtccggtggtggagggccaggccgcagcgcccgtcaccctctcgctggcagaattaacggcattaaccgttgagttgcatatcccgctggtcgcctcgacccgcgagccgctgtttgagaccgtcgatctgctcgatttccccggttatcgcgggcgcctcggcgttgagtcgatggatgatattcgccgcgcggtcaacagtgaagagagcaacccgctggcgcagctgattttacgtggcaaagtcgcttatctctttgagcgctataccgaaaaccaggagatgaacgtcctggtggtctgtacggcttccaccaagcagtcggatgttaaagaggtgggcggcgtgctcgatgagtggatccgctacacccagggcgctgacgccgaggcgcgcggccgccgtctgccggggctaatttgggcgctgaccatgttcgatctgcgcatcagccaggggctgtcgcaagaggaggcaatcctgcgacaatcctgggggctgggcgggatgatcaaaatggcaatgaccgagcgcttcggtcagtacaaatggatgcaggagtggcagcgcggacaggcgtttaacaacaccttcctcgtgcgcaagccgcgtcagcagacgccgtttattcgtattagcgacggtaacgaagcggcgtttagcgaagagaacctgccgcagctccaactgatgcgcaaaaccttccttgaagatgaagcggttaaccgctatatcgcctcgccggatgaagcctgggacgcgatgctcgagcttaacgacggcgggatgcgccgcatggctgattacctctcgaccgttgcgcgtccggaagtgaagctcgagcgcattgccgagcagttgcaggagatccgcgatgagctgatcgagggcggtttaggcaactggtatcagccagacggcgaagaggatgcggcgaaaaaggcgcagattgcccgcgacattctggatgtgctgaaaaaacgcagcggtatgcacggcgagctattgctgcgcctggtgccgacgcgccgcgatttgcaggcgctctatctgcaacaaaccacactgccggtgcaggaagaggcacctgaagagctggatattttcgatatcggtgttggcgctgcctttggggctgaagcacctgcggcaacgacctatagccacgaaattgccttcgcgcatcagagcgtgcagcactggatcaaccatctacgcggcttgtcggaaagcccggcgttgctcaactacatcaatttaccgcgcccgattatcgacgcgctggccgatgaactgattaccgccctgctccgtctgcgcatcgaagagaagctcgttgaagcgatgaccaataccgagcaggcaggcgtgttgctggagcagatggtggaccgtcaggtgtcgcgcatcctgcatgtgatgggcgattttattacctggcttgggtacctcgagatgcccgcagcgaaacgcccgacacgcttgaatatgccggatcagcacattttcacccgcccctctcagtgcgacagcgtggtgtggaaagacgacgagcgcctggcacgtttaacgccgcaacaactgaactacaccgccatgttcattatcgactggctggtgggactggagtcgctgattaccgagaacgcgggccattcggccggtcgggagatcagcgtggcgcagaacgaaaaactgggcgccatcatccgtcagattcagacttcacaggagtaa

SEQ ID NO: 1058 - DNA, 1701 bp, Kosakonia cowanii
  source 1..1701: mol_type = genomic DNA
atgaaacctgtaaaacgtctttacctgtccggtgacgaagtgcatgccgctgatgtgaatatcgtgctggagctgagcaactgcgggcgggggtttatcaccgccgcaacggagcaggattacaccggcaaaatggtgcgtctcgatattggctacggtgagtcgctgtttcgctggtttaccggctatgtggagcgctcccagcctgcggaaaagggcttttcacgcctgtttgtgcgtgagctgtccggggtgtttgaaaagctgtggccgtgctctttccagcaccccacgctgcgcgatatcactgcctggctgacggaaaacagcggcctgacggtggccgtgccggatgccggttacagtgacaagcctgtgccccatttcacgcattccggtaccgggttccagctgctgaataatctgggcaaggcctttggcgtggcggattatctctggtatcagttgccggatggctcgctttacaccggcggggcagaaaagtctctctttgctgcgcgcccggtagatatcccgcatgaattcagccaggcagcggcgggtggcaacagcatgacgctgccgatgatccagacaatgcgccccggtgttgagatgaacggcgagagggtgacgaaagtcagtctcaccggcgacacgatggttatcacctggacgccgcgcgacaaagccaccggcgcgcccctgcaaaaaacaccggcacagcggcagatagaaagccatttcccggagctggccagcgggatgcacctgcctaagtttgcgcgggtgatggccgcgagtgaaccggccagcagcggggattttgccgatccgttccggccacgttatgccgtcgatgtgcagctgcttgatgcagacggcaagcccgacagcggtacgccggtttattctgccgtgccgctgcccgtgccaatggccgggaatgattcgggcatgttccagtttccgcccgaagggacgctggtagaggtggccttcaccggcggcagaccggataagccgtttgtgcgccagaccgtaccggagggcacaagcctgccggacgtgaagcccggcgaacagctgcaacagcagcgcgctgaggtatcgcagcgggtgacgcagggcggtgactgggagcgacagacggatcagtcaatccgcgaaacatccatgtcccgccacgttcaggccgataccgaaacccgcgaaatggtgacgcgtgaaaccaccattaaagccacggacaaaaccacagtgctgggaacagccaccctgatggccgggcatatccagcatgtgaccagcggcgattatgcgatggccaccggggggaaatacgtcgcgagtgtgacgggcgatgccgaaacggagattgccgggaaacagtcaacgaaagtcactggcggtatcagcattgaaaccagcggcgcactgactgaaaagattgccgcgctgcgcaaatctgtagccgctggcggtcagcagctgatgggggcaaccgtgcatatcggcagcgaaagcataaatgcgctggccatgatgctggacaccattgatttgctggcagagctggcgcagcagtgtgccagccacacccaccccggcaccggtgcaccggccagtgccagcgcctttacgcaggtggccgcaagggcggggcagactcgcagtaaatatgacaagattattgcctaa

SEQ ID NO: 1059 - DNA, 1281 bp, Kosakonia cowanii
  source 1..1281: mol_type = genomic DNA
atgataagaataacaaggatcgttaaaccttcagttgaattaaccgattatgccgcgtcattttcgccttttcgtacgctcctcgaaacctatttacccgcctctatccaaaatttatatgcccgcccggttatcgccgatgatggtgccgttgagtggtatagcgatattaatggtcagccgcgccgcttactcgatctgagtgaaaccgagcagagccgcgcccgcgcggtgctggaacagcgtctcgacagcgttcgggccctgcatcagaagctggcgcaaagcgggagcgagccagaaacaatgctgcgcctgctacaggcggccacccactctcctgcacctgagcaggtgtgggtgatcgacggccatccggtcatcgtcccacctgcggagggcgcgccccgcgccgctgctgccgccgccactgccgctgccgtctcaaggcgtcgctggtggccgtggcttttacttctggcactgcttatcgccctgattctgttgctgctgtcaagctgttcgccactgcacgaaacagcagcacccgtcacgcccgtgccaccagctgtaacgcccggcgagccggtgaaacctgaaacgacacccgccccgcacgcgccggtaaaacccaccaaagcggtctgcccggcgcagcgaacccaacagcaagcccctgaaatggtggtaattatggacgcctccggttcgatggctatcaccatggatgccacgcaggatgagttgatcagctggaaccaggggaaatatgtcgagaatatcgaacgtgaaccgcgccgtatctcgctggcgcgaaacgcggccaaaggcattattgacactatcccgcgcgatatgaacatcagcctggtggcggcggaaaactgccgtcaggtctccctgtcgcccagcttcccgtttgcccagcgatcggcgctgaaaaagcggattgaaggtattcaaccggtcggtaaaacgcctctcgccgaagccttagcactggcgggcaaaaaagtggatggggttaaccgcgatgcgattattttgctggtttccgacggagatgaaacctgcggcggcgatccctgtcaggttgcccgcgagctgaaaaagagtaaaccgcgcctgcaggtgaatgtcgtcgatattatgagcaccggtgcaggaaattgtattgccagcagcaccggcggcaaagtttttgccgtcaacaatacccgggaatttaagcagatcatgaaaaaggcgatgcaagaatatattcctgagggctgcgaataa

SEQ ID NO: 1060 - DNA, 1407 bp, Kosakonia cowanii
  source 1..1407: mol_type = genomic DNA
gtgaaagagatgtttctgtgcagtgacaagctcaataaatatcagtcgatgggcgaaaacgggcaggctgtccatatttctgcgctgcagttgcgcgaaacccttcgcctgcgcaaacagagcgcggcggcagatgtgctcgccattccgcaaatcagtgaacacggcgaacgggttgactggtatgccccattttccggcgacgtcattccctggtcagcggccacggagagcgaacgtcaaagcgccttagcgcagctggaaaccacgcaggccacgttgcgccagctcagccaggatttcgcccagagcaaccagccggagcagcagctatttggtaagctgctggaaaaaaccctgcaatttcccgatcccgagcatgtctggctggtcaacggcaagccggtgatcagcttctggggattcgtcaacgcccgccatcaggcacggatcgatccgctggactgcttacgtccgccgaaacccgttacgcccgcagccccgctgcacagcgcgccgccggtcaacgaaccgctggtgacgccgccgaagcgtcgcggatggtggatcctgcccgcgtggttatgctggctgctaccgctgctgctgttagcgcttctgctgctgtggctgctgcgcggctgcgtacccggcgtcaccattcctggctttagcgttgagcaaccggcactgcctgatgcgcaccttccggttgcggagaatggcgccaccctgcccgtcacctcctctgaacgtgttgttggcaccaccgaaggcgttactgcgccagtggtgagcggcagcacgacaggcatcgtcccgttgagcgatgaagagcgtgccacagctgccccggaaaacgccgccgcccttaacgatcctgccgtgccggtcgcgcctgaaacaggcagcgagcctgcgcaagctggcgttgagcccgtgacgccagaggcgcaggtgaacgacccggcgctggcggagcccaacgctactgcgggcaacgctaccgcgccggtagaggtgaaaaacccgttaagcctgccgccggaagcgctggcgcaggggcgtaccgatttcctcaatggccaatggcgcgcaggcgcaggcatccaggatcagcgtaccggcaagccgctgagcctcaactaccagattaaagatggcaaaggtgaagtgcagatggtgcgcggcgatggcgtctcctgccgcggcgcggtcaatgccgccatccaggccggcaagctggccattaataaccagggtgaagcgcaatgtaccgatggctcggtttaccagatgccggagatcgtctgtgcgcccggtgctaagagcgttgccgactgtaaaggcagctacggcaccagtacccttttccccctttcgatgaagcaggaggcaagtaactaa

SEQ ID NO: 1061 - DNA, 3003 bp, Kosakonia cowanii
  source 1..3003: mol_type = genomic DNA
atgctggctgagctcactgattttaaaaaacaggtcaaacttatccgtgacagcgggattcagttcctcgacttcgctttctccctgcccgcgcgtaaagcctacggcgaatttctgcgccagcagggcgaaggtgcggtgctgcgccttatctacaacgagcgtgacgacaagtttcaggtcccgacgccagacggcgaaacgccgcgcaacgccgaaccggagtatgcgctggcgattgaagattccctgagcctttatgcggggatctggttgccgctgcccttctttcgcttcaacccgccgggcggcttttctcacgggccgactaactggtcgcgcgtgcagtttcatcaactgccggagccggacgagaaaggcaacacctggcgtgcaacgctgattttcgataccaaaatctttccagaccgcgaacatacacaatacctggcacccggcgaagatgatgtccgttccggggccggttttgcgctggcctgcttaccgcaccagatgggcgacttcctgactcttccatggattgaggagtggctgaacgatatctataccaggcaggcgcacgctgtgctgcgtcagcaccctgaagacaccgaagagaagctggggctgaaagagcatcaggcgcacttccttaacctgctcgaggtgctgaaaaagaccatcgtcattccagaagtacagctcaatgacgtgaaaattcgtgataccgcgatccccgtcgacctggtgctggatattggcaactcacgcagctgcggcgtgctgattgaggagcatgcggcggataacaaaggcctctcccagctttatcagctgcaattgcgcgatctgagccagccgcagtttgtctataacgagccgtttgagagccgactggagtttgcgcaggcggagtttggcaagcaggacttctcatcgaaaagcgggcgcagcgacgcctttacctggccgaccatcggccgcgtcggcggtgaggctttccgcatggcggcgcagcgtttaggtaccgaaggctcaaccggcctctccagcccgaaacgctatctgtgggacgatcagccctactcgccgggctggcgtttcagccaggcgtttgtcaaatcggatcgtgaaccgctggcgaccgccgccccgctgctctatatgctcaatgatcatggcaagctgttgattcgcctcaatgaagatgagcggatgccggtcttctcgccggtttacagccgcagttcattgatgaccatgatgctctcagaggtgctgagccaggcgttaatgcagatcaacagcccggcgcagcgcctgaagatgagccacgccagccatccacgtcgtttacgcaacgtgatcctgaccgtgccgccggcgatgccgaaaccagagcgcgccatctttgaagcctgcatgcatgacgctatccgcctggtgtggaaatcgcttgagtgggaagagatggattacgacggcgaagagagcggcaatgcgaagcagccgcaccccggcgttcatgtgaagtgggatgaagcgacctgcggacagctggtctatctctataacgaaacgcagaccaattttggtggccgcaccgatgagttttttgccgccacccgtcgccccgataatcagcaggcggagggggaacaacgcagcctgaagatcgcctccatcgacattggcggtggcaccaccgatctggtgatcacccgctatacgctggatgacggtaaaggcattaacgtgcgcattacaccgaaacagctcttccgcgaaggctttaaagtggcgggcgacgacattctgctggatgtcatccgtctctatctccagccagccgtaaaagcggcgatgatgaaagtcggccacagcgatatcgcggcagagtcgatgatgtcgcagctgttcggcagtgaagcgatcgaagcgggcaagcaggtgctgcgccagcagttgacgctgcaaatcttctcaccgctggcgctggccattcttcatcgctatgaagagtacaagccggagagtggccgcgaagtcctcaactataccttccgcgaactgctcaccggcactacgcctaccgccaaagtgcaggattacgttaacgacgtggtgcgcaccggccagttggcgagcgaagcactcttctcactgctcgacgtgccgttagaggtcgatctcgcccgtctgcataatgagtttatcgatccgcgcagcggtcggatgaacatctgccatagcctgcgcgccctgtgtgaagtgctctggcactacaactgcgatgtgctgctgttaacgggccgcccttcgcgcctgccgggcattcaggcgctgattcgccagctccagccggtgccgccgacgcgggttctgccgctgcacgggtatgaaaccggcggctggtatcccttcaacaaaaaagggtgcattgacgatccgaaatccaccgcggtggtcggcgcgatgctctgcctgctggcggagaagtcgcgtctcaacaacttctatttccgcgcggcaaactttaccgcctactcgacgatccgctacctcggcatgctggatggcaacaacgtcatcaaagacagcaacgtcttttacagcgatatcgacctcgatgtcgctgacttccagctgcctcagggccagccatttgaggcgcgcggtgaagtgcgtatcggtttccgtcagctggataacgagcgctggccggcctcgtcgctttataccctgaaaatcaacaatccgaaccttgccagcgaactcgccggcgatgcggtgatgcgtattgagctgatggcggaacagggccgcgcgcgaaacggcgaagaggcggtcagcccggagcgtttccgtattgagtcgctggagatggagcacgccagacgaaactacagccgcaaggacgtgaccttccagttaaacacgatggttggcaatggcatgggcgaaagccagtactggctggatagcgggagcattaagagctaa

SEQ ID NO: 1062 - DNA, 2667 bp, Kosakonia cowanii
  source 1..2667: mol_type = genomic DNA
atgaacagcatcaattcgaagcaaattatccagggctggcagggcgttgaacgcggtgccggtgaagcgattgagtggatcaacgcggtgcgccaggatgcgccgcgtcttaataccgaagccgaccgtctgacgattaacctccgccgcagccgtaacaaggcgcgccgtctggcgctggcagcagcaaaaccgatgaccatcggcttctttggcctgtcgcaggcgggcaaatcctacctgatttccgcactggcggcgggtgaaaacggcaagctggagacccgcctcggcggtaagcagctcgattttctgacccacatcaacccgccgggcggtggcaaagaggcaaccggcctggtgacgcgctttagccgccgtcaggttggcggcgacgagcgctggccggtgacgctgcaactgtttagcgaaatcgagatgggcaaaattctcgccaacgcctttatccatgattttaatcaggaaaaatttgactggcagtatgacgaagggcgcatcaacgatctgctggcctcgctgaccaaacgccgtcgcccaacccacgtggcgggcatcagtgaagatgatgtcgtctcgctgtgggattacctgagccgccatgcggaaaaaagccagagccgcttagcgctgcactactggccgcaggcgattacgctggcgccgtggctgacgccggaggatcgcggccagctcttctcggtgttatggggcgaggtggcagagctgaccgaagcctatatccgtttcgcgcaaaccctgcatcggctgggcggcgcgcaggaagtgtgggcaccgttaagcacgctggtcagcgaagagaatggcctgctggtgcagcgcgacagcattatgaatgtcgacatgctggagcggctgaataaagagaccgatatccgcattgaggtctgtccggtggtggagggccaggccgcagcgcccgtcaccctctcgctggcagaattaacggcattaaccgttgagttgcatattccgctggtcgcctcgacccgcgagccgctgtttgagaccgtcgatctgctcgatttccccggttatcgtgggcgcctcggcgttgagtcgatggatgatattcgccgcgcggtcaacagtgaagagagcaacccgctggcgcagctgattttacgtggcaaagtcgcttatctctttgagcgctataccgaaaaccaggagatgaacgtcctggtggtctgtacagcctcgaccaagcagtcggatgttaaagaggtgggcggcgtgctcgatgagtggatccgctacacccagggcgccgacgccgaggcgcgcggccgccgtctgccggggctaatttgggcgctgaccatgttcgatctgcgcatcagccaggggctgtcgcaagaggaggcaatcctgcgacaatcctgggggctgggcgggatgatcaaaatggcaatgaccgagcgcttcggtcagtacaaatggatgcaggagtggcagcgcggacaggcgtttaacaacaccttccttgtgcgcaagccgcgccagcagacgccgtttattcgtattagcgacggtaacgaagcggcatttagcgaagagaacctgccgcagctccagctgatgcgcaaaaccttcctcgaagatgaagcggtcaatcgctatatcgcctcgccggacgaagcctgggacgccatgctcgagcttaacgacggcgggatgcgccgcatggctgattacctctcaaccgttgcgcgtccggaagtgaagctcgagcgcattgccgagcagttgcaggagatccgcgatgagctgatcgagggcggtttaggcaactggtatcagccagacggcgaagaggatgcggcgaaaaaggcgcagattgcccgcgacattctggatgtgctgaaaaaacgcagcggtatgcacggcgagctgttgctgcgcctggtgccgacgcgccgcgatttgcaggcactctatctgcaacaaaccacactgccggtgcaggaagaggcgcctgaagaactggatattttcgatatcggtgttggtgctgcctttggggctgaagcacctgcggcaacgacctatagccacgaaattgcttttgcgcatcagagcgtgcagcactggatcaaccatctacgcggcttgtcggaaagcccggcgttgctcaactacatcaatttaccgcgcccgattatcgacgcgctggccgatgaactgattaccgccctgctccgtctgcgcatcgaagagaagctcgttgaggcgatgaccaataccgagcaggcaggcgtgctgctggagcagatggtggaccgtcaggtgtcgcgcatcctgcatgtgatgggcgattttattacctggcttgggtacctcgagatgcccgcagcgaaacgcccgacacgcttgaatatgccggatcagcacattttcacccgcccctctcagtgcgacagcgtggtgtggaaagacgacgagcgcctggcacgtttaacgccgcaacaactgaactacaccgccatgttcattatcgactggctggtgggactggagtcgctgattaccgagaacgcgggccattcggccggtcgggagatcagcgtggcgcagaacgaaaaactgggcgccatcatccgtcagattcagacttcacaggagtaa

SEQ ID NO: 1063 - DNA, 1701 bp, Kosakonia cowanii
  source 1..1701: mol_type = genomic DNA
atgaaacctgtaaaacgtctttacctgtccggtgacgaagtgcatgccgctgatgtgaatatcgtgctggagctgagcaactgcgggcgggggtttatcaccgccgcaacggagcaggattacaccggcaaaatggtgcgtctcgatattggctacggtgagtcgctgtttcgctggtttaccggctatgtggagcgctcccagcctgcggaaaagggcttttcacgcctgtttgtgcgtgagctgtccggggtgtttgaaaagctgtggccgtgctctttccagcaccccacgctgcgcgatatcaccgcctggctgacggaaaacagcggcctgacggtggccgtgccggatgccggttacagtgacaagcccgtgccccatttcacgcattccggcaccgggttccagctgctgaataatctgggcaaggcctttggcgtggcggattatctctggtatcagctgccggatggctcgctttacaccggcggagcggaaaagtccctctttgcttcgcgcccggtggatatcccgcatgaattcagccaggcagcggcgggtggcaacagcatgacgctgccgatgatccagacaatgcgccccggtgttgagatgaacggcgagagggtgacgaaagtcaatctcaccggcgacacgatggttatcacctggacgccgcgcgacaaagccaccggcgcgcccctgcaaaaaacaccggcacagcggcagatagaaagccatttcccggagctggccagcggtatgcacctgcctaagtttgcgcgggtgatggccgcgagtgaaccggccagcagcgggaattttgccgatccgttccggccacgttatgccgtcgatgtgcagctgctagacgcagacggcaagcccgacagcggtacgccggtttattctgccgtgccgctgcccgtgccaatggccgggaatgattcgggcatgttccagtttccgcccgaagggacgctggtagaggtggccttcaccggcggcagaccggataagccgtttgtgcgccagaccgtgccggagggcacaagcctgccggacgtgaagcccggcgaacagctgcaacagcagcgcgccggggtatcgcagcgggtgacgcagggcggtgactgggagcgacagacggatcagtcaatccgcgaaacatccatgtcccgccacgttcaggccgataccgaaacccgaaaaatggtgacgcgtgaaaccaccattaaagccacggacaaaaccaccgtgctgggaacggccaccctgatggccgggcatatccagcatgtgaccagcggcgattatgcgatggccaccggggggaaatacgtcgcgagtgtggcaggcgatgccgaaacggagattgccgggaaacagtcaacgaaagtcactggcggtatcagcattgaaaccagcggcgcactgactgaaaagattgccgcgctgcgcaaatctgtggccgctggcggtcagcagctgatgggggcaaccgtgcatatcggcagcgaaagcataaatgcgctggccatgatgctggacaccattgatttgctggcagagctggcgcagcagtgtgccagccacacccaccccggcaccggtgcaccggccagtgccagcgcctttacgcaggtggccgccagggcgggtcagacccgcagcaaataccagaagataatcgcctga

SEQ ID NO: 1064 - DNA, 1281 bp, Kosakonia cowanii
  source 1..1281: mol_type = genomic DNA
atgataagaataacaaggatcgttaaaccttcagttgaattaaccgattatgccgcgtcattttcgccttttcgtacgctcctcgaaacctatttacccgcctctatccaaaatttatatgcccgcccggttatcgccgatgatggtgccgttgagtggtatagcgatattaatggtcagccgcgccgcttactcgatctgagtgaaaccgagcagagccgcgcccgcgcgctgctggaacagcgtctcgacagcgttcgggccctgcatcagaagctggcgcaaaacgggagcgagccagaaacaatgctgcgccagctacaggcggccacccactctcctgcacctgagcaggtgtgggtgatcgacggccatccggtcatcgtcccacctgcggagggcgccccccgcgccgctgatgccgccaccactgccgctgccgtctcaagccgtcgctggtggccgtggcttttacttctggcactgcttatcgccctgattctgttgctgctgtcacgctgttcgccactgcacgaaacagcagcacccgtcgcgcccgtgccaccagctgtaacgcccggcgagccggtgaaacctgaaacgacacccgccccgcacgcgccggtaaaacccaccaaagcggtctgcccggcgcagcgaacccaacagcaagcccctgaaatggtggtaattatggacgcctccggttcgatggctatcaccatggatgccacgcaggatgagttgatcagctggaaccaggggaaatatgtcgagaatatcgaacgtgaaccgcgccgtatctcgctggcgcgaaacgcggccaaaggcattattgacactatcccgcgcgatatgaacatcagcctggtggcggcggaaaactgccgtcaggtctccctgtcgcccagcttcccgtttgcccagcgatcggcgctgaaaaagcgcattgaaggtattcaaccggtcggtaaaacgcctctcgccgaagccttagcactggcgggcaaaaaagtggatggggttaaccgcgatgcgattattttgctggtttccgacggagatgaaacctgcggcggcgatccctgccaggttgcccgcgagctgaaaaagagtaaaccgcgcctgcaggtgaatgtcgtcgatattatgagcaccggtgcaggaaattgtattgccagcagcaccggcggcaaagtttttgccgtcaacaatacccgggaatttaagcagatcatgaaaaaggcgatgcaagaatatattcctgagggctgcgaataa

SEQ ID NO: 1065 - DNA, 1407 bp, Kosakonia cowanii
  source 1..1407: mol_type = genomic DNA
gtgaaagagatgtttctgtgcagtgacaagctcaataaatatcagtcgatgggcgaaaacgggcaggctgtccatatttctgcgctgcagttgcgcgagacccttcgcctgcgcaaacagagcgcggcggcagatgtgctcgccattccgcaaatcagtgaacacggcgaacgggttgactggtatgcccctttttccggcgacgtcattccctggtcagcggccacggagagcgaacgtcaaagcgccttagcgcaactggaaaccacgcaggccacgttgcgccagctcagccaggatttcgcccagagcaatcagccggagcagcagctgtttggtaagctgctggaaaaaaccctgcaatttcccgatcccgagcatgtctggctggtcaacggcaagccggtgatcagcttctggggattcgtcaacgcccgccatcaggcacggatcgatccgctggactgcttacgtccgccgaaacccgttacgcccgcagccccactgcacagcgcgccgccggtcaacgaaccgctggtgacgcagccgaagcgtcgcggatggtggatcctgcccgcgtggttatgctggctgctaccgttactgctgttagctcttctgctgctgtggctgctgcgcggctgcgtacccggcgtcaccattcctggctttagcgttgagaaaccggcgcttcctgacgtgcatcttccggttgcggagaatggcgccaccctgcccgtcacctcctctgaacgtattgttggcaccaccgaaggcgttactgcgccagtggtgagcggcagcacgacgggcatcgtcccgttgagtgatgaagagcgtgccacagctgccccggaaaacgccgccgcccttaacgatcccgccgtgccggtcgcgcctgaaacaggcagcgagcctgcgcaagctggcgttgagcccgtgacgccagaggcgcaggtgaacgacccggcgctggcggaacccaacgctactgcgggcaacgctaccgcgccggtggaggtgaaaaacccgttaagcctgccgccggaagcgctggcgcaggggcgtaccgatttcctcaatggccaatggcgcgcaggcgcaggcatccaggatcagcgtaccggcaagccgctgagcctcaactaccagattaaagatggcaaaggtgaagtgcagatggtgcgcggcgatggcgtctcctgccgcggtgcggtcaatgccgccatccaggccggcaagctggccattaataaccagggtgaagcgcaatgtaccgatggctcggtttaccagatgccggagatcgtctgtgcgcccggtgctaagagcgttgccgactgtaaaggcagctacggcaccagtacccttttccccctttcgatgaagcaggaggcaagtaactaa

SEQ ID NO: 1066 - DNA, 3003 bp, Kosakonia cowanii
  source 1..3003: mol_type = genomic DNA
atgctggctgagctcactgattttaaaaaacaggtcaaacttatccgtgacagcgggattcagttcctcgacttcgctttctccctgcccgcgcgtaaagcctacggcgagtttctgcgccagcagggcgaaggtgcggtgctgcgccttatctacaacgagcgtgacgacaagttccaggtcccgacgccagacggcgaaacgccgcgcaacgccgaaccggagtatgcgctggcgattgaagattccctgagcctttatgcggggatctggttgccgctgcccttctttcgcttcaacccgccgtgcggcttttctcacgggccgactaactggtcgcgcgtgcagtttcatcaactgccggagccggacgagaaaggcaacacctggcgtgcaacgctgattttcgatacaaaaatctttccagaccgcgaacatacacaatacctggcacccggcgaagatgatgtccgttccggggccggttttgcgctggcctgcttaccacaccagatgggcgacttcctgactcttccatggattgaggagtggctgaacgatatctataccaggcaggcacacgctgtgctgcgtcagcaccccgaagacaccgaagagaagctggggctgaaagagcatcaggcgcacttccttaacctgctcgaggtgctgaaaaagaccatcgccattccagaagtacagctcaatgacgtgaaaattcgtgataccgcgatccccgtcgacctggtgctggatattggcaactcacgcagctgcggcgtgctgattgaggagcatgcagcggataacaaaggcctctcccagctttatcagttgcaattgcgcgatctgagccagccgcagtttgtctataacgagccatttgagagccgactggagttcgcgcaggcggagtttggcaagcaggacttctcatcgaaaagcgggcgcagcgacgcctttacctggccgaccatcggccgcgtcggcggtgaggctttccgcatggcggcgcagcgtttaggtaccgaaggctcaaccggcctctccagcccgaaacgctatctgtgggacgatcagccctactcgccgggctggcgttttagccaggcgtttgtcaaatcggatcgtgaaccgctggcgaccgccgccccgctgctctatatgctcaatgatcatggcaagctgttgattcgcctcaatgaagatgagcggatgccggtcttctcgccggtttacagccgcagttcattgatgaccatgatgctctcagaggtgctgagccaggcgttaatgcagatcaacagcccggcgcagcgcctgaagatgagccacgccagccatccacgtcgtttacgcaacgtgatcctgaccgtgccgccggcgatgccgaaaccagagcgcgccatctttgaagcctgcatgcatgacgctatccgcctggtgtggaaatcgctggagtgggaagagatggattacgacggcgaagagagcggcaatgcgaagcagccacaccccggcgttcatgtgaagtgggatgaagcgacctgcggacagctggtctatctctataacgaaacgcagaccaattttggtggccgcaccgatgagttttttgccgccacccgtcgccccgataatcagcaggcggagggggaacaacgcagcctgaagatcgcctccatcgacattggcggtggcaccaccgatctggtgatcacccgctatacgctggatgacggtaaaggcattaacgtgcgcattacaccgaaacagctcttccgcgaaggctttaaagtggcgggcgacgacattctgctggatgtcatccgtctctatctccagccagccgtaaaagcggcgatgatgaaagtcggccacagcgatatcgcggcagagtcgatgatgtcgcagctgttcggcagtgaagcgatcgaagcgggcaagcaggtgctgcgccagcagttgacgctgcaaatcttctcaccgctggcgctggccattcttcatcgctatgaagagtacaagccggagagtggccgcgaagtcctcaactataccttccgcgaactgctcaccggcactacgcctaccgccaaagtgcaggattacgttaacgacgtggtgcgcaccggccagttggcgagcgaagcgctcttctcactgctcgatgtgccgttagaggtcgatctcgcccgtctgcataatgagtttatcgatccgcgcagcggccggatgaacatctgccatagcctgcgcgccctgtgtgaagtgctctggcactacaattgtgatgtgctgctgttaacgggccgcccttcacgcctgccgggcatccaggcgctgattcgccagctccagccggtgccgccgacgcgggttctgccgctgcacgggtatgaaaccggcggctggtatcccttcaacaaaaaagggtgcattgacgatccgaaatccaccgcggtggtcggcgcgatgctctgcctgctggcggagaagtcgcgtctcaacaacttctatttccgcgcggcaaactttaccgcctactcgacgatccgctacctcggcatgctggatggcaacaacgtcatcaaagacagcaacgtcttttacagcgatatcgaccttgatgccgctgacttccagctgcctcagggccagccatttgaggcgcgcggtgaagtgcgtatcggtttccgtcagctggataacgagcgctggccggcctcgtcgctctataccctgaaaatcaacaatcctaaccttgccagcgaactcgccggcgatgcggtgatgcgtattgagctgatggcggaacagggccgcgcgcgaaacggcgaagaggcggtcagcccggagcgtttccgtattgagtcgctggagatggagaacgccagacgaaactacagccgcaaggacgtgaccttccagttaaacacgatggttggcaatggcatgggcgaaagccagtactggctggatagcgggagcattaagagctaa

SEQ ID NO: 1067 - DNA, 2667 bp, Kosakonia cowanii
  source 1..2667: mol_type = genomic DNA
atgaacagcatcaattcgaagcaaattatccagggctggcagggcgttgaacgcggtgccggtgaagcgattgagtggatcaacgcggtgcgccaggatgcgccgcgtcttaataccgaagccgaccgtctgacgattaacctccgccgcagccgtaacaaggcgcgccgtctggcgctggcagcagcaaaaccgatgaccatcggcttctttggcctgtcgcaggcgggcaaatcctacctgatttccgcactggcggcgggtgaaaacggcaagctggagacccgcctcggcggtaagcagctcgattttctgacccacatcaacccgccgggcggtggcaaagaggcaaccggcctggtgacgcgctttagccgccgtcaggttggcggcgacgagcgctggccggtgacgctgcaactgtttagcgaaatcgagatgggcaaaattctcgccaacgcctttatccatgattttaatcaggaaaaattcgactggcagtatgacgaagggcgcatcagcgatctgttgaattcgctggccaaacgccgtcgcccaacccgcgtggcgggcatcagtgaagatgatgtcgtctcgctgtgggattacctgagccgccatgcggaaaaaagccagagccgcttagcgctgcactactggccgcaggcgattacgctggcgccgtggctgacgccggaggatcgcggtcagctcttctcggtgttatggggcgaggtcgcagagttgaccgaagcttatatccgtttcgcgcaaaccctgcatcggctgggcggcgcgcaggaagtgtgggcgccgttaagcacgctggtcagcgaagagaatggcctgctggtgcagcgcgacagcattatgaatgtcgacatgctggagcggctgaataaagagaccgatatccgcattgaggtttgtccggtggtggagggccaggccgcagcgcccgtcaccctctcgctggcagaattaacggcattaaccgttgagttgcatatcccgctggtcgcctcgacccgcgagccgctgtttgagaccgtcgatctgctcgatttccccggttatcgcgggcgcctcggcgttgagtcgatggatgatattcgccgcgcggtcaacagtgaagagagcaacccgctggcgcagctgattttacgtggcaaagtcgcttatctctttgagcgctataccgaaaaccaggagatgaacgtcctggtggtctgtacagcctcgaccaagcagtcggatgttaaagaggtgggcggcgtgctcgatgagtggatccgctacacccagggcgccgacgccgaggcgcgcggccgccgtctgccggggctaatttgggcgctgaccatgttcgatctgcgcatcagccaggggctgtcgcaagaggaggcaatcctgcgacaatcctgggggctgggcgggatgatcaaaatggcaatgactgagcgcttcggtcagtacaaatggatgcaggagtggcagcgcggacaggcgtttaacaacaccttccttgtgcgcaagccgcgtcagcagacgccgtttattcgtattagcgacggtaacgaagcggcgtttagcgaagagaacctgccgcagctccaactgatgcgcaaaaccttcctcgaagatgaagcggtcaatcgctatatcgcctcgccggacgaagcctgggacgcgatgctcgagcttaacgacggcgggatgcgccgtatggctgattacctctcgaccgttgcgcgtccggaagtgaagctcgagcgcattgccgagcagttgcaggagatccgcgatgagctgatcgagggcggtttaggcaactggtatcagccagacggcgaagaggatgcggcgaaaaaggcgcagattgcccgcgacattctggatgtgctgaaaaaacgcagcggtatgcacggcgagctgttgctgcgcctggtgccgacgcgccgcgatttgcaggcactctatctgcaacaaaccacactgccggtgcaggaagaggcgcctgaagagctggatattttcgatatcggtgttggcgctgcctttggggctgaagcacctgcggcaacgacctatagccacgaaattgccttcgcgcatcagagcgtgcagcactggatcaaccatctacgcggcttgtcggaaagcccggcgttgctcaactacatcaatttaccgcgcccgattatcgacgcgctggccgatgaactgattaccgccctgctccgtctgcgcatcgaagagaagctcgttgaggcgatgaccaataccgagcaggcaggcgtgctgctggagcagatggtggaccgtcaggtgtcgcgcatcctgcatgtgatgggcgattttattacctggcttgggtacctcgagatgcccgcagcgaaacgcccgacacgcttgaatatgccggatcagcacattttcacccgcccctctcagtgcgacagcgtggtgtggaaagacgacgagcgcctggcgcgtttaacgccgcaacaactgaactacaccgccatgttcattatcgactggctggtgggactggagtcgctgattaccgagaacgcgggccactcggccggacgggagatcagcgtggcgcagaacgaaaaactgggtgccatcatccgtcagattcagacttcacaggagtaa

SEQ ID NO: 1068 - DNA, 1281 bp, Kosakonia cowanii
  source 1..1281: mol_type = genomic DNA
atgataagaataacaaggatcgttaaaccgtcagttgaattaaccgattatgccacgtcattttcgccttttcgtacgctcctcgaaacctatttacccgcctctatccaaaatttatatgcccgcccggttatcgccgatgatggtgccgtggagtggtatagcgatattaatggtcagccgcgccgcttactcgatctgagtgaaaccgagcagagccgcgcctgcgccgtgctggaacagcgtctcgacagcgttcgggcactgcatcagaagctggcgcaaagcgggagcgaaccagaaacaatgctgcgcctgctgcaggcggccagtcactctcctgcacctgagcaagtgtgggtaattgacggtcacccggtgattgttccgcctgcggagggcacgccccgcgccgctgctgccgcaaccactgccgctgccgtctcaagccgtcgctggtggccatggcttttacttctggcactgcttatcgccctgattctgttgctgttgtcacgctgttcgccactgcatgaaacagcagcacccgtcacgcccgcgccaccagctgtaacgcccggcgagccggtgaaacctgaaacggcacccgcgccgcaagcgccggtaaaacccaccaaagcggtctgcccggcgcagcgaacccaacagcaagcccctgaaatggtggtgattatggacgcctccggttcgatggccatcaccatggatgccacgcaggatgagttgatcagctggaaccaggggaaatatgtcgagaatatcgaacgtgaaccgcgccgtatctcgctggcgcgtaacgcggccaaaggcattattgacactatcccgcgcgatatgaacatcagcctggtggcggcggaaaactgccgtcaggtctccctgtcgcccagcttcccctttgcccagcgatcggcgctgaaaaagcggattgaaggtattcaaccggtcggtaaaacgcctctcgccgaagccttagcgctggcgggcaaaaaggtggatggcgtgaaccgcgatgcgatcattttgctggtctctgacggagatgaaacctgcggcggcgatccctgccaggttgcccgcgagctgaaaaagagtaaaccgcgcctgcaggtgaatgtcgtcgatattatgagcaccggcgcaggaaattgtattgccagcagcaccggcggcaaagtttttgctgtaaacaatacccgggaatttaagcagatcatgaaaaaggcgatgcaagaatatattcctgagggctgcgaataa

SEQ ID NO: 1069 - DNA, 1407 bp, Kosakonia cowanii
  source 1..1407: mol_type = genomic DNA
gtgaaagagatgtttctgtgcagtgacaagctcaataaatatcagtcgatgggcgaaaacgggcaggctgtccatatttctgcgctgcagttgcgcgaaacgcttcgcctgcgcaaacagggcgcggcggccgatgtgctcgccattccgcaaattagtgaacacggcgaacgtattgactggtatgccccttttccgggcgatgtcattccctggtcagcggccacggagagcgaacgtcaaagcgccctggcgcagttggaaaccacgcaggccacgttgcgccagctcagccaggatttcgcccagagcaaccagccggagcagcagctgtttggtaagttgctggaaaaaaccctgcaatttcccgatcccgagcatgtctggctggtcaacggcaagccggtgatcagcttctggggattcgtcaacgcccgccatcaggcacggatcgatccgctggattgcttacgtccgccgaaacccgttacgcccgcggccccgctgcacagcgcgccgccgatcaacgagccggtggtaacgccgccgaagcgtcgcggatggtggatcctgcccgcgtggttatgttggctgttaccgctgcttcttttagcacttctgctgctgtggctgctgcgcggctgcgtacccggcgtaactattcctggctttagcgttgagcaaccggcactgactgatgcgcaccttccggttgcggagaatggcgccaccctgcccgtcacctcctctgaacgtgttgttggcactaccgagggcgtgactgcgccagtggtgagcggcagcacgacgggcatcggcccgttgagtgatgaagagcgcgccacagctaccccggaaaacgccgccgcccttaacgatcccgccgtgccggtcgcgcctgaaacaggcagcgaacctgcgcaagctggcgttgagcccgtgacgccagaggcgcaggtgaacgacccggcgctggcggaaccaaatgctaccgcgggcaatgctaccgcgccggtggaggtgaaaaacccgttaagcctgccgccggaagcgctggcgcaggggcgtaccgatttcctcaatggccaatggcgcgcaggcgcaggcatccaggatcagcgtaccggcaagccgctgagcctcaactaccagattaaagatggcaaaggtgaagtgcagatggtgcgcggcgacggcgtctcctgccgcggcgcggtcaatgccgccatccaggccggcaagctggccattaataaccagggtgaagcgcaatgtaccgatggctcggtttaccagatgccggagatcgtctgtgcgcccggtgctaagagcgttgccgactgtaaaggcagctacggcaccagtacccttttccccctttcgatgaagcaggaggcaagtaactaa

SEQ ID NO: 1070 - DNA, 3003 bp, Kosakonia cowanii
  source 1..3003: mol_type = genomic DNA
atgctggctgagctcactgattttaaaaaacaggtcaaacttatccgtgacagcgggattcagttcctcgacttcgctttctccctgcccgcgcgtaaagcctacggcgagtttttgcgccagcagggcgaaggtgcggtgctgcgccttatctacaacgagcgtgacgacaagtttcaggtcccgacgccagacggcgaaacgccgcgcaacgccgagccggagtatgcgctggcgattgaagattccctgaacctttatgcggggatctggttgccgctgcccttctttcgcttcaacccaccgggcggcttttctcacgggccgactaactggtcgcgcgtgcagtttcatcaactgccggagccggatgagaaaggcaacacctggcgtgcaacgctgattttcgataccaaaatctttcctgaccgcgaacatacacaatacctggcacccggcgaagatgatgtccgttccggggccggttttgcgctggcctgcttaccgcaccagatgggcgacttcctgactcttccatggattgaggagtggctgaacgatatctataccaggcaggcacacgctgtgctgcgtcagcaccctgaagacaccgaagagaagctggggctgaaagagcatcaggcgcacttccttaacctgctcgaggtgctgaaaaagaccatcgccattccagaagtacagctcaatgacgtgaaaattcgtgataccgcgatccccgtcgacctggtgctggatattggcaactcacgcagctgcggcgtgctaattgaggagcatgcggcggataacaaaggcctctcccagctttatcagctgcaattgcgcgatctgagccagccgcagtttgtctataacgagccatttgagagccgactggagttcgcgcaggcggagtttggcaagcaggacttctcgtcgaaaagtgggcgcagcgacgcctttacctggccgacgatcggccgtgtcggcggtgaggctttccgcatggcggcgcagcgtttaggcaccgaaggctcaaccggcctctccagcccgaaacgctatctgtgggacgatcagccctactctccgggctggcgtttcagccaggcgtttgtcaaatcggatcgtgaaccgctggcaaccgccgcaccgctgctctatatgctcaacgatcatggcaaactgttgattcgcctcaatgaagatgagcggatgccggtcttctcgccggtttacagccgcagttcattgatgaccatgatgctctcagaagtgctgagccaggctttaatgcagatcaacagcccggcgcagcgcctgaagatgagccacgccagccatccgcgtcgtttacgcaacgtgatcctgaccgtaccgccggcgatgccgaaaccagagcgcgccatttttgaagcctgcatgcatgacgctatccgcctggtgtggaaatcgctggagtgggaagagatggattacgacggcgaagagagcggcaatgcgaagcagccgcaccccggcgttcatgtgaagtgggatgaagcgacctgcggacagctggtctatctctataacgaaacgcagaccaatttcggtggccgcaccgatgagttttttgccgccacccgtcgccccgataatcagcaggcggaaggggaacaacgcagcctgaagatcgcctccatcgacattggcggcggcaccaccgatctggtgatcacccgctatacgctggatgacggtaaaggcattaacgtgcgtattacaccgaaacagctcttccgtgaaggcttcaaagtggcgggcgacgacattctgctggatgtcatccgtctctatctccagccagccgtaaaagcggcgatgatgaaagtcggccacagcgatatcgcggcagagtcgatgatgtcgcagctgttcggcagcgaagcgatcgaagcgggcaagcaggtgctgcgccagcagttgacgctgcaaatcttctcgccgctggcgctggccattcttcatcgatatgaagagtacaagccggagagtggccgcgaagtcctcaactataccttccgcgaactgctcaccggcactacacctaccgccaaagtgcaggattacgttaacgacgtggtgcgtaccggccaactggcgaatgaagcgcccttctcactgctcgatgtgccgttagaggtcgatctcgcccgtctgcataatgagtttatcgatccacgcagcggccggatgaacatctgccatagcctgcgcgccctgtgtgaagtgctctggcactacaactgcgatgtgctgctgttaacgggacgcccttcacgcctgccgggcatccaggcgctgattcgccagctccagccggtgccgccgacgcgggttctgccgctgcacgggtatgaaaccggcggctggtatcccttcaataaaaaagggtgcattgacgatccgaaatccaccgcggtggtcggcgcgatgctctgcctgctggcggagaagtcgcgtctcaacaacttctatttccgcgcggcaaactttaccgcctactcgacgatccgctacctcggcatgctggatggcaacaacgtcatcaaagacagcaacgtcttttacagcgatatcgacctcgatgccgctgacttccagctccctcagggcctgccatttgaggcgcgcggtgaagtgcgtatcggtttccgccagctggataacgagcggtggccggcctcgtcgctctataccctgaaaatcaacaatccgaaccttgccagcgaacttgccggcgatgcggtgatgcgtattgagctgatggcggaacagggccgcgcgcgaaacggcgaagaggctgtgagcccggagcgtttccgtattgaatcgctggagatggagaacgccagacgaaactacagccgcaaggacgtgaccttccagttaaacacgatggttggcaatggcatgggcgaaagccagtactggctggatagcgggagcattaagagctaa

SEQ ID NO: 1071 - DNA, 2667 bp, Kosakonia cowanii
  source 1..2667: mol_type = genomic DNA
atgaacagcatcaattcgaagcaaattatccagggctggcagggcgttgaacgcggtgccggtgaagcgattgagtggatcaacgcggtgcgccaggatgcgccgcgtcttaataccgaagccgaccgtctgacgattaacctccgccgcagccgtaacaaggcgcgccgtctggcgctggcagcggcaaaaccgatgaccatcggcttctttggcctgtcgcaggcgggcaaatcctacctgatttccgcgctggcggcgggtgaaaacggcaagctggagacccgcctcggcggtaaacagctcgattttctgacccacatcaacccgccgggcggcggcaaagaggcaaccggcctggtgacgcgctttagccgccgtcaggttggcggcgacgagcgctggccggtgacgctgcaactgtttagcgaaatcgagatgggcaaaattctcgccaacgcctttatccatgattttaatcaggaaaaatttgactggcagtatgacgaagggcgcatcaacgatctgctggcctcgctgaccaaacgacgtcgcccaacccgcgtggcgggcatcagtgaagatgatgtcgtctcgctgtgggattacctgagccgccatgcggaaaaaagccagagccgcttagcgctgcactactggccgcaggcgattacgctggcgccgtggctgacgccggaggatcgcggccagctcttctccgtgttatggggcgaggtggcagagctgaccgaagcctatatccgttttgcgcaaaccctgcatcggctgggcggcgcgcaggaagtgtgggcaccgttaagcacgctggtcagtgaagagaatggcctgctggtgcagcgcgacagcattatgaatgtcgacatgctggagcggctgaataaagagaccgatatccgcattgaggtctgcccggtggtggaaggcctggccgcagcgcccgttaccctgtcgctggcagaattaacggcattaaccgttgagttgcatatcccgctggtctcctcgacccgcgagccgctgtttgaaaccgtcgatctgctcgattttcccggttatcgtggacgcctcggcgttgagtcgatggatgacattcgccgcgcggttaatagcgaagagagcaacccgctggcgcagctgattttacgtggcaaagtcgcttatctctttgagcgctataccgaaaaccaagagatgaacgtcctggtggtctgtacagcctcgaccaagcagtcggatgtgaaagaggtgggcggcgtgctcgatgagtggatccgctacacccagggcgccgacgccgaggcgcgcggccgccgtctgccggggctaatttgggcactgaccatgttcgatctgcgcatcagccaggggctgtcgcaagaggaggcaatcctgcgacagtcctgggggctgggcgggatgatcaaaatggcaatgaccgagcgtttcggtcagtacaaatggatgcaggagtggcagcgcggacaggcgtttaacaacaccttcctcgtgcgcaagccgcgccagcagacgccgtttattcgtattagcgacggtaacgaagcggcgtttagcgaagagaaccttccgcagttacagctgatgcgcaaaaccttcctcgaagatgaagcggtcaatcgctatatcgcctcgccggacgaagcctgggacgccatgctcgagcttaacgacggcgggatgcgccgcatggctgattacctctcaaccgttgcgcgtccggaagtgaagcttgagcgcatcgccgagcagttgcaggagatccgcgatgagctgatcgagggcgggttaggcaactggtatcagccagacggcgaagaggatgcggcgaaaaaggcgcagattgcccgcgacattctggatgtgctgaaaaaacgcagcggtatgcacggcgagctgttgctgcgcctggtgccgacgcgccgcgatttgcaggcactctatctgcaacaaaccacactgccggtgcaggaagagacgcctgaagagctggatatcttcgatatcggtgttggcgctgcctttggggctgaagcacctgcggcaacgacctatagccacgaaattgccttcgcgcatcagagcgtacagcactggatcaaccatctgcgcggcttgtcggaaagcccggcgttgctcaactacatcaatttaccgcgcccgattatcgacgcgctggccgatgaactgattaccgccctgctccgtctgcgcatcgaagagaagctcgttgaggcgatgaccaataccgagcaggccggcgtgctgctggagcagatggtggaccgccaggtgtcgcgcatcctgcatgtgatgggcgattttattacctggcttgggtacctcgagatgcccgcagcaaaacggccaacacgcttgaatatgccggagcagcacattttcacccgcccctctcagtgcgacagcgtggtgtggaaagacgacgagcgcctggcgcgtttaacgccgcaacaactgaactacaccgccatgttcattatcgactggctggtgggactggagtcgctgattaccgagaacgcgggccactcggccggtcgggagatcagcgtggcgcagaacgaaaaactgggcgccatcatccgtcagattcagacttcacaggagtaa

SEQ ID NO: 1072 - DNA, 1701 bp, Kosakonia cowanii
  source 1..1701: mol_type = genomic DNA
atgaaacctgtaaaacgtctttatctgtccggtgacgaagtgcatgccgctgatgtgaatatcgtgctggagctgagcaactgcgggcgggggtttatcaccgccgcaacggagcaggattacaccggcaaaatggtacgcctcgatattggctacggtgagtcgctgtttcgctggtttaccggctatgtggagcgctcccagcctgcggaaaagggcttttcacgcctgtttgtgcgcgagctgtccggggtgtttgaaaagctgtggccgtgctctttccagcaccccacgctgcgcgatatcaccgcctggctgacggaaaacagcggcctgacggtggccgtgccggatgccggttacagtgacaagcccgtgccccatttcacgcattccggcaccgggttccagttgcttaacaatctgggcaaggcctttggcgtggcggattatctctggtatcagctgccggatggctccctttacaccggcggggcagaaaagtccctctttgctgcacgcccggtggatatcccgcatgaattcagccaggccgcggcgggtggaaacagcatgacgctgccgatgatccagacaatgcgccccggtgttgagatgaacggcgagagggtgacgaaagtcagtctcaccggcgacacgatggttatcacctggacgccgcgcgacaaagccaccggcgcgcccctgcaaaaaacaccggcacagcggcagatagaaagccatttcccggagctggccagcggtatgcacctgcctaagtttgcgcgggtgatggccgcgagtgaaccggccaacagcgggaattttgccgatccgttccggccacgttatgccgtcgatgtgcagctgcttgacgctgacggcaagcccgacagcggtacgccggtttattctgccgtgccgctgcccgtgccaatggccgggaatgattcgggcatgttccagtttccgcccgaagggacgctggttgaggtggccttcaccggcggcaggccggataagccctttgtgcgccagaccgtgccggagggcacaagcctgccggatgtgaagcccggcgaacagctgcaacagcagcgcgccgaggtatcgcagcgggtgacgcagggcggtgactgggagcgacagacggatcagtcaatccgcgaaacatccatgtcacgacacgttcaggccgatactgaaacccgcgaaatggtgacgcgtgaaaccaccattaaagccacggacaaaaccactgtgctgggaacagccaccctgatggccgggcatatccagcatgtgaccagtggcgattatgcgatggccaccggcgggaaattcgtcgcgagtgtgacgggcgatgccgaaacggagatcgccgggaaacagtcaacgaaagtgaccggcgggatcagcattgaaaccagtggcgcactgactgaaaagattgccacgctgcgcaaatccgtggccgccggcggtcagcagctgatgggggcaaccgtgcatatcggcagcgaaagcattaatgcgctggccatgatgctggacaccatcgatttgctggcagagctggcgcagcagtgtgccagccacacccaccccggaaccggaacaccggtcagcgccagcgcctttacgcaggtggccgcaagggcggggcagactcgcagtaaatatgacaagattattgcctaa

SEQ ID NO: 1073 - DNA, 1698 bp, Kosakonia cowanii
  source 1..1698: mol_type = genomic DNA
atgaaacctgtaaaacgtctttatctgtccggtgacgaagtgcatgccgctgatgtgaatatcgtgctggagctgagcagctgcgggcgcggtttcatcactgccgcaacggagcaggattacaccggcaaaatggtgcgtctcgatattggctacggtgagtcgctgtttcgctggtttaccggctatgttgagcgctcccagcctgcggaaaagggcttttcacgcctgtttgtgcgcgagctgtccggggtgtttgaaaagctgtggccgtgctctttccagcaccccacgctgcgcgatattaccgcctggctgacggaaaacagcggcctgacggtggccgtgccggatgcagggtacagtgacaagcccgtgccccatttcacgcattcaggcaccgggttccagctgctgaataatctgggcaaggcctttggcgtggcggattatctctggtatcagctgccggatggctcgctttacaccggcggggcagaaaagtccctctttgctgcgcgcccggtagatatcccgcatgaattcagccaggcagcggcgggcggcaacagcatgacgctgccgatgatccagacaatgcgccccggtgttgagatgaacggcgagcgggtaacgaaagtcagtctcaccggcgacacgatggttatcacctggacgccgcgcgacaaagccaccggcgcgcccctgcaaaaaacaccggcacaacggcagatagaaagccattttccggagctggccagcggtatgcacctgcctaagtttgcgcgggtgatggccgcgagtgaaccggccagcagcgggaattttgccgatccgttccggccgcgttatgccgtcgatgtgcagctgcttgacgcagacggtaagcccgacagcggtacgccggtttattctgccgtgccgctgcccgtgccaatggccgggaatgattcgggcatgttccagtttccgcccgaagggacgctggttgaggtggccttcaccggcggcagaccggataagccctttgtgcgccagaccgtgccggagggcacaagcctgccggacgtgaagccgggcgagcagttgcagcagcagcgcgccgaggtatcgcagcgggtgacgcagggcggtgactgggagcgacagacggatcagtcaatccgcgaaacatccatgtcccgccacgttcaggccgatactgaaacccgcgaaatggtgacgcgtgaaaccaccattaaagccacggacaaaaccaccgtgctgggaacggccaccctgatggccgggcatatccagcatgtgaccagcggcgattatgcgatggccaccggcgggaaatacgtggcgagtgtgacgggcgatgccgaaacagagatcgccgggaaacagtcaacgaaagtgaccggcgggatcagcattgaaaccagcggcgcactgactgaaaaaatcgcggcgctacgcaaatccgtggccgccggtcagcagctgatgggggcaaccgtgcatatcggcagcgaaagcattaatgcgctgaccatgatgctggacaccattgatttgctggcagagctggcgcagcagtgtgccagccacacccaccccggcaccgggacaccggtcagtgccagcgcctttacgcaggtggccgccagggcggggcagacccgcagcaaataccagaagataatcgcctga

SEQ ID NO: 1074 - DNA, 1281 bp, Kosakonia cowanii
  source 1..1281: mol_type = genomic DNA
atgataagaataacaaggatcgttaaaccttcagttgaattaaccgattatgccgcgtcattttcgccttttcgtacgctcctcgaaacctatttacccgcctctatccaaaatttatatgcccgcccggttatcgccgatgatggtgccgttgagtggtatagcgatattaatggtcagccgcgccgcttactcgatctgagtgaaaccgagcagagccgcgcccgcaccgtgctggaacagcgtctcgacagcgttcgggcactgcatcagaagctggcacaaaacgggagcgagccagaaacaatgctgcgcctgctacaggcggccacccactctcctgcacctgagcaggtgtgggtgatcgacggccatccggtcatcgtcccacctgcggagggcgcgccccgcgccgctgctgctgccaccactgccgctgccgtctcaaggcgtcgctggtggccgtggcttttacttctggctctgcttatcgccctgattctgttgctgctgtcacgctgttcgccaccgcacgaaacagcagcacccgtcacgcccgtgccaccagctgtatcgcccggcgagccggtgaaacctgaaacgacacccgccccgcacgcgccggtaaaacccaccaaagcggtctgcccggcgcagcgaacccaacagcaagcccctgaaatggtggtaattatggacgcctccggttcgatggctatcaccatggatgccacgcaggatgagttgatcagctggaacctggggaaatatgtcgagaatatcgaacgtgaaccgcgccgtatctcgctggcgcgaaacgcggccaaaggcattattgacactatcccgcgcgatatgaacatcagcctggtggcggcggaaaactgccgtcaggtctccctgtcgcccagcttcccgtttgcccagcgatcggcgctgaaaaagcggattgaaggtattcaaccggtcggtaaaacgcctctcgccgaagccttagcactggcgggcaaaaaagtggatggggttaaccgcgatgcgattattttgctggtttccgacggagatgaaacctgcggcggcgatccctgccaggttgcccgcgagctgaaaaagagtaaaccgcgcctgcaggtgaatgtcgtcgatattatgagcaccggtgcaggaaattgtattgccagcagcaccggcggcaaagtttttgccgtcaacaatacccgggaatttaagcagatcatgaaaaaggcgatgcaagaatatattcctgagggctgtgaataa

SEQ ID NO: 1075 - DNA, 1407 bp, Kosakonia cowanii
  source 1..1407: mol_type = genomic DNA
gtgaaagagatgtttctgtgcagtgacaagctcaataaatatcagtcgatgggcgaaaacgggcaggctgtccatatttctgcgctgcagttgcgcgaaacccttcgcctgcgcaaacagagcgcggcggcagatgtgctcgccattccgcaaatcagtgaacacggcgaacgggttgactggtatgccccattttccggcgacgtcattccctggtcagcggccacggagagcgaacgtcaaagcgccttagcgcaactggaaaccacgcaggccacgttgcgccagctcagccaggatttcgcccagagcaaccagccggagcagcagctgtttggtaagctgctggaaaaaaccttgcaatttcccgatcccgagcatgtctggctggtcaacggcaagccggtgatcagcttctggggattcgtcaacgcccgccatcaggcacggatcgatccgctggactgcttacgtccgccgaaacccgttacgcccgcagccccactgcacagcgcgccgccggtcaacgaaccgctggtgacgccgccgaaacgtcgcggatggtggatcctgcccgcgtggttatgctggctgctaccgctgctgctgttagcgcttctgctgctgtggctgctgcgcggctgcgtacccggcgtcaccattcctggctttagcgttgagaaaccggcgcttcctgacgtgcatcttccggttgcggagaatggcgccaccctgcccgtcacctcctctgaacgtattgttggcaccaccgaaggcgttactgcgccagtggtgagcggcagcacgacgggcatcgtcccgttgagtgatgaagagcgtgccacagctgccccggaaaacgccgccgcccttaacgatcccgccgtgccggtcgcgcctgaaacaggcagcgagcctgcgcaagctggcgttgagcccgtgacgccagaggcgcaggtgaacgacccggcgctggcggaacccaacgctactgcgggcaacgctaccgcgccggtggaggtgaaaaacccgttaagcctgccgccggaagcgctggcgcaggggcgtaccgatttcctcaatggccaatggcgcgcaggcgcaggcatccaggatcagcgtaccggcaagccgctgagcctcaactaccagattaaagatggcaaaggtgaagtgcagatggtgcgcggcgatggcgtctcctgccgcggtgcggtcaatgccgccatccaggccggcaagctggccattaataaccagggtgaagcgcaatgtaccgatggctcggtttaccagatgccggagatcgtctgtgcgcccggtgctaagagcgttgccgactgtaaaggcagctacggcaccagtacccttttccccctttcgatgaagcaggaggcaagtaactaa

SEQ ID NO: 1076 - DNA, 3003 bp, Kosakonia cowanii
  source 1..3003: mol_type = genomic DNA
atgctggctgagctcactgattttaaaaaacaggtcaaacttatccgtgacagcgggattcagttcctcgacttcgctttctccctgcccgcgcgtaaagcctacggcgaatttctgcgccagcagggcgaaggtgcagtgctgcgccttatctacaacgagcgtgacgacaagtttcaggtcccgacgccagacggcgaaacgccgcgcaacgccgaaccggagtatgcgctggcgattgaagattccctgagcctttatgcagggatctggttgccgctgcccttctttcgcttcaacccgccgggcggcttttctcacgggccgactaactggtcgcgcgtgcagtttcatcaactgccggagccggacgagaaaggcaacacctggcgtgcaacgctgattttcgataccaaaatctttcccgaccgcgaacatacacaatacctggcacccggcgaagatgatgtccgttccggggccggttttgcgctggcctgcttaccgcaccagatgggcgacttcctgactcttccatggattgaggagtggctgaacgatatctataccaggcaggcacacgctgtgctgcgtcagcaccctgaagacaccgaagagaagctggtgctgaaagagcatcaggcgcacttccttaacctgctcgaggtgctgaaaaagaccatcgccattccagaagtacaactcaatgacgtgaaaattcgtgataccgcgatccccgtcgacctggtgctggatattggcaactcacgcagctgcggcgtgctgattgaggagcatgcggcggataacaaaggcctctctcagctctatcagctgcaattgcgcgatctgagccagccgcagtttgtctataacgagccgtttgagagccgactggagttcgcgcaggcggagtttggcaagcaggacttctcatcgaaaagcgggcgcagcgacgcctttacctggccgaccatcggccgcgtcggcggtgaggctttccgcatggcggcgcagcgtttaggtaccgaaggctcaaccggcctctccagcccgaaacgctatctgtgggacgatcagccctactctccgggctggcgtttcagccaggcgtttgtcaaatcggatcgtgaaccgctggcgaccgccgccccgctgctctatatgctcaatgatcatggcaagctgttgattcgcctcaatgaagatgagcggatgccggtcttctcgccggtttacagccgcagttcattgatgaccatgatgctctcagaggtgctgagccaggcgttaatgcagatcaacagcccggcgcagcgcctgaagatgagccacgccagccatccacgtcgtttacgcaacgtgatcctgaccgtgccgccggcgatgccgaaaccagagcgcgccatctttgaagcctgcatgcatgacgctatccgcctggtgtggaaatcgctggagtgggaagagatggattacgacggcgaagagagcggcaatgcgaagcagccacaccccggcgttcatgtgaagtgggatgaagcgacctgcggacagctggtctatctctataacgaaacgcagaccaattttggtggccgcaccgatgagttttttgccgccacccgtcgccccgataatcagcaggcggagggggaacaacgcagcctgaagatcgcctcgatcgacattggcggtggcaccaccgatctggtgatcacccgctatacgctggatgacggtaaaggcattaacgtgcgcattacaccgaaacagctcttccgcgaaggctttaaagtggcgggcgacgacattctgctggatgtcatccgtctctatctccagccagccgtaaaagcggcgatgataaaagtcggccacagcgatatcgcggcagagtcgatgatgtcgcagctgttcggcagtgaagcgatcgaagcgggcaaacaggtgctgcgccagcagttgacgctgcaaatcttctcaccgctggcgctggccattcttcatcgctatgaagagtacaagccggagagtggccgcgaagtcctcaactataccttccgcgaactgctcaccggcactacgcctaccgccaaagtacaggattacgttaacgacgtggtgcgcaccggccagttggcgagcgaagcgctcttctcactgctcgatgtgccgttagaggtcgatctcgcccgtctgcataatgagtttatcgatccgcgcagcggccggatgaacatctgccatagcctgcgcgccctgtgtgaagtgctctggcactacaactgcgatgtgctgctgttaacgggccgcccttcacgcctgccgggcatccaggcgctgattcgccagctccagccggtgccgccgacgcgggttctgccgctgcacgggtatgaaaccggcggctggtatcccttcaacaaaaaagggtgcattgacgatccgaaatccaccgcggtggtcggcgcgatgctctgcctgctggcggagaagtcgcgtctcaacaacttctatttccgcgcggcaaactttaccgcctactcgacgatccgctacctcggcatgctggatggcaacaacgtcatcaaagacagcaacgtcttttacagcgatatcgacctcgatgccgctgacttccagctccctcagggccagccatttgaggcgcgcggtgaagtgcgtatcggtttccgccagctggataacgagcgctggccggcctcgtcgctctataccctgaaaatcaacaatcctaaccttgccagcgaactcgccggcgatgcggtgatgcgtattgagctgatggcggaacagggccgcgcgcgaaacggcgaagaggcggtcagcccggagcgtttccgtattgagtcgctggagatggagcacgccagacgaaactacagccgcaaggacgtgaccttccagttaaacacgatggttggcaatggcatgggcgaaagccagtactggctggatagcgggagcattaagagctaa

SEQ ID NO: 1077 - DNA, 2667 bp, Kosakonia cowanii
  source 1..2667: mol_type = genomic DNA
atgaacagcatcaattcgaagcaaattatccagggctggcagggcgttgaacgcggtgccggtgaagcgattgagtggatcaacgcggtgcgccaggatgcgccgcgtcttaataccgaagccgaccgtctgacgattaacctccgccgcagccgtaacaaggcgcgccgtctggcgctggcagcagcaaaaccgatgaccatcggcttctttggcctgtcgcaggcgggcaaatcctacctgatttccgcactggcggcgggtgaaaacggcaagctggagacccgcctcggcggtaagcagctcgattttctgacccacatcaacccgccgggcggcggcaaagaggcaaccggcctggtgacgcgctttagccgccgtcaggttggcggcgacgagcgctggccggtgacgctgcaactgtttagcgaaatcgagatgggcaaaattctcgccaacgcctttatccatgattttaatcaggaaaaatttgactggcagtatgacgaagggcgcatcaacgatctgctggcctcgctgaccaaacgccgtcgcccaacccgcgtggcgggcatcagtgaagatgatgtcgtctcgctgtgggattacctgagccgccatgcggaaaaaagccagagccgcttagcgctgcactactggccgcaggcgattacgctggcgccgtggctgacgccggaggatcgcggccagctcttctcggtgttatggggcgaggtggcagagctgaccgaagcctatatccgtttcgcgcaaaccctgcatcggctgggcggcgcgcaggaagtgtgggcgccgttaagcacgctggtcagcgaagagaatggcctgctggtgcagcgcgacagcattatgaatgtcgacatgctggagcggctgaataaagagaccgatatccgcattgaggtttgtccggtggtggagggccaggccgcagcgcccgtcaccctctcgctggcagaattaacggcattaaccgttgagttgcatatcccgctggtcgcctcgacccgcgagccgctgtttgagaccgtcgatctgctcgatttccccggttatcgcgggcgcctcggcgttgagtcgatggatgatattcgccgcgcggtcaacagtgaagagagcaacccgctggcgcagctgattttacgtggcaaagtcgcttatctctttgagcgctataccgaaaaccaggagatgaacgtcctggtggtctgtacagcctcgaccaagcagtcggatgttaaagaggtgggcggcgtgctcgatgagtggatccgctacacccagggcgccgacgccgaggcgcgcggccgccgtctgccggggctaatttgggcgctgaccatgttcgatctgcgcatcagccaggggctgtcgcaagaggaggcaatcctgcgacaatcctgggggctgggcgggatgatcaaaatggcaatgaccgagcgcttcggtcagtacaaatggatgcaggagtggcagcgcggacaggcgtttaacaacaccttccttgtgcgcaagccgcgccagcagacgccgtttattcgtattagcgacggtaacgaagcggcatttagcgaagagaacctgccgcagctccagctgatgcgcaaaaccttcctcgaagatgaagcggtcaatcgctatatcgcctcgccggacgaagcctgggacgccatgctcgagcttaacgacggcgggatgcgccgtatggctgattacctctcgaccgttgcgcgtccggaagtgaagctcgagcgcattgccgagcagttgcaggagatccgcgatgagctgatcgagggcggtttaggcaactggtatcagccagacggcgaagaggatgcggcgaaaaaggcgcagattgcccgcgacattctggatgtgctgaaaaaacgcagcggtatgcacggcgagctattgctgcgcctggtgccgacgcgccgcgatttgcaggcactctatctgcaacaaaccacactgccggtgcaggaagaggcgcctgaagagctggatattttcgatatcggtgttggcgctgcctttggggctgaagcacctgcggcaacgacctatagccacgaaattgccttcgcgcatcagagcgtacagcactggatcaaccatctacgcggcttgtcggaaagcccggcgttgctcaactacatcaatttaccgcgcccgattatcgacgcgctggccgatgaactgattaccgccctgctccgtctgcgcgtcgaagagaagctcgttgaggcgatgaccaataccgagcaggcaggcgtgttgctggagcagatggtggaccgtcaggtgtcgcgcatcctgcatgtgatgggcgattttattacctggcttgggtacctcgagatgcccgcagcgaaacgcccgacacgcttgaatatgccggatcagcacattttcacccgcccctctcagtgcgacagcgtggtgtggaaagacgacgagcgtctggcgcgtttaacgccgcaacaactgaactacaccgccatgttcattatcgactggctggtgggactggagtcgctgattaccgagaacgcgggccactcggccggacgggagatcagcgtggcgcagaacgaaaaactgggcgccatcatccgtcagattcagacttcacaggagtaa

SEQ ID NO: 1078 - DNA, 1281 bp, Kosakonia cowanii
  source 1..1281: mol_type = genomic DNA
atgataagaataacaaggatcgttaaaccttcagttgaattaaccgattatgccgcgtcattttcgccttttcgtacgctcctcgaaacctatttacccgcctctatccaaaatttatatgcccgcccggttatcgccgatgatggtgccgttgagtggtatagcgatattaatggtcagccgcgccgcttactcgatctgagtgaaaccgagcagagccgcgcccgcaccgtgctggaacagcgtctcgacagcgttcgggcactgcatcagaagctggcgcaaaacgggagcgagccagaaacaatgctgcgcctgctacaggcggccacccactctcctgcacctgagcaggtgtgggtgatcgacggccatccggtcatcgtcccacctgcggagggcgcgccccgcgccgctgccgccgccaccactgccgctgccgtctcaaggcgtcgctggtggccgtggcttttacttctggctctgcttatcgccctgattctgttgctgctgtcacgctgttcgccactgcacgaaacagcagcacccgtcacgcccgcgccaccagctgtaacgcccggcgagccggtgaaacctgaaacgacacccgccccgcacgcgccggtaaaacccaccaaagcggtctgcccggcgcagcgaacccaacagcaagcccctgaaatggttgtgattatggacgcctccggttcgatggccatcaccatggatgccacgcaggatgagttgatcagctggaaccaggggaaatatgtcgagaatatcgaacgtgaaccgcgccgtatctcgctggcgcgtaacgcggccaaaggcattattgacactatcccgcgcgatatgaacatcagcctggtggcggcggaaaactgccgtcaggtctccctgtcgcccagcttcccgtttgcccagcgatcggcgctgaaaaagcgcattgaaggtattcaaccggtcggtaaaacgcctctcgccgaagccttagcactggcgggcaaaaaagtggatggggttaaccgcgatgcgattattttgctggtttccgacggagatgaaacctgcggcggcgatccctgccaggttgcccgcgagctgaaaaagagtaaaccgcgcctgcaggtgaatgtcgtcgatattatgagcaccggtgcaggaaattgtattgccagcagcaccggcggcaaagtttttgccgtcaacaatacccgggaatttaagcagatcatgaaaaaggcgatgcaagaatatattcctgagggctgcgaataa

SEQ ID NO: 1079 - DNA, 1407 bp, Kosakonia cowanii
  source 1..1407: mol_type = genomic DNA
gtgaaagagatgtttctgtgcagtgacaagctcaataaatatcagtcgatgggcgaaaacgggcaggctgtccatatttctgcgctgcagttgcgcgaaacccttcgcctgcgcaaacagagcgcggcggcagatgtgctcgccattccgcaaatcagtgaacacggcgaacgggttgactggtatgcccctttttccggcgacgtcattccctggtctgcggccacggagagcgaacgtcaaagcgccttagcgcaactggaaaccacgcaggccacgttgcgccagctcagccaggacttcgcccagagcaaccagccggagcagcagctgtttggtaagctgctggaaaaaaccctgcaatttcccgatcccgagcatgtctggctggtcaacggcaagccggtgatcagcttctggggattcgtcaacgcccgccatcaggcacggatcgatccgctggactgcttacgtccgccgaaacccgttacgcccgcagccccactgcacagcgcgccgccggtcaacgaaccgctggtgacgccgccgaagcgtcgcggatggtggatcctgcccgcgtggttatgctggctgctaccgctgctgctgttagcgcttctgctgctgtggctgctgcgcggctgcgtatccggcgtaaccattcctggctttagcgttgagcaaccggcactgcctgatgcgcgccttccggttgcggagaatggcgccaccctgcccgtcacctcctctgaacgtgttgttggcaccaccgaaggcgttactgcgccagtggtgagcggcagcacgacgggcatcgtcccgttgagcgatgaagagcgtgccacagctgccccggaaaacgcctccgcccttaacgatcctgccgtgccggtcgcgcctgaaacaggcagcgagcctgcgcaagctggcgttgagcccgtgacgccagaggcgcaggtgaacgacccggcgctggcggaacccaacgctactgcgggcaacgctaccgcgccggtagaggtgaaaaacccgttaagcctgccgccggaagcgctggcgcaggggcgtaccgatttccttaatggccaatggcgcgcaggcgcaggcatccaggatcagcgtaccggcaagccgctgagcctcaactaccagattaaagatggcaaaggtgaagtgcagatggtgcgcggcgatggcgtctcctgccgcggtgcggtcaatgccgcaatccaggccggcaagctggccattaataaccagggtgaagcgcaatgtaccgatggctcggtttaccagatgccggagatcgtctgtgcgcccggtgctaagagcgttgccgactgtaaaggcagctacggcaccagtacccttttccccctttcgatgaagcaggaggcaagtaactaa

SEQ ID NO: 1080 - DNA, 3003 bp, Kosakonia cowanii
  source 1..3003: mol_type = genomic DNA
atgctggctgagctcactgattttaaaaaacaggtcaaacttatccgtgacagcgggattcagttcctcgacttcgctttctccctgcccgcacgtaaagcctacggcgagtttctgcgccagcagggcgaaggtgcagtgctgcgccttatctacaacgagcgtgacgacaagtttcaagtcccgacgccagacggcgaaacgccgcgcaacgccgaaccggagtatgcgctggcaattgaagattccctgagcctttatgcagggatctggttgccgctgcccttctttcgcttcaacccgccgggcggcttttctcacgggccgactaactggtcgcgcgtgcagtttcatcaactgccggagccggacgagaaaggcaacacctggcgtgcaacgctgattttcgatacaaaaatctttcccgaccgcgaacatacacaatacctggcacccggcgaagatgatgtccgttccggggccggttttgcgctggcctgcttaccacaccagatgggcgacttcctgactcttccatggattgaggagtggctgaacgatatctataccaggcaggcacacgctgtgctgcgtcagcaccctgaagacaccgaagagaagctggggctgaaagagcatcaggcgcacttccttaacctgctcgaggtgctgaaaaagaccatcgtcattccagaagtacagctcaatgacgtgaaaattcgtgataccgcgatccccgtcgacctggtgctggatattggcaactcacgcagctgcggcgtgctgattgaggagcatgcggcggataacaaaggcctctctcagctctatcagctgcaattgcgcgatctgagccagccgcagtttgtctataacgagccatttgagagccgactggagtttgcgcaggcggagtttggcaagcaggacttctcatcgaaaagcgggcgcagcgacgcctttacctggccgaccatcggccgcgtcggcggtgaggctttccgcatggcggcgcagcgtttaggtaccgaaggctcaaccggcctctccagcccgaaacgctatctgtgggacgatcagccctactcgccgggctggcgtttcagccaggcgtttgtcaaatcggatcgtgaaccgctggcgaccgccgccccgctgctctatatgctcaatgatcatggcaagctgttgattcgcctcaatgaagatgagcggatgccggtcttctcgccggtttacagccgcagttcattgatgaccatgatgctctcagaggtgctgagccaggcgttaatgcagatcaacagcccggcgcagcgcctgaagatgagccacgccagccatccacgtcgtttacgcaacgtgatcctgaccgtgccgccggcgatgccgaaaccagagcgcgccatctttgaagcctgcatgcatgacgctatccgcctggtgtggaaatcgctggagtgggaagagatggattacgacggcgaagagagcggcaatgcgaagcagccgcaccccggcgtgcatgtgaagtgggatgaagcgacctgcggacagctggtctatctctataacgaaacgcagaccaattttggtggccgcaccgatgagttttttgccgccacccgtcgccccgataatcagcaggcggagggggaacaacgcagcctgaagatcgcctccatcgacattggcggtggcaccaccgatctggtgatcacccgctatacgctggatgacggtaaaggcattaacgtgcgcattacaccgaaacagctcttccgcgaaggctttaaagtggcgggcgacgacattctgctggatgtcatccgtctctatctccagccagccgtaaaagcggcgatgatgaaagtcggccacagcgatatcgcggcagagtcgatgatgtcgcagctgttcggcagtgaagcgatcgaagcgggcaagcaggtgctgcgccagcagttgacgctgcaaatcttctcaccgctggcgctggccattcttcatcgctatgaagagtacaagccggagagtggccgcgaagtcctcaactataccttccgcgaactgctcaccggcactacgcctaccgccaaagttcaggattacgttaacgacgtggtgcgcaccggccagttggcgagcgaagcgctcttctcactgctcgatgtgccgttagaggtcgatctcgcccgtctgcataatgagtttatcgatccgcgcagcggccggatgaacatctgccatagcctgcgcgccctgtgtgaagtgctctggcactacaactgcgatgtgctgctgttaacgggccgcccttcacgcctgccgggcatccaggcactgattcgccagctccagccggtgccgccgacgcgggttctgccgctgcacgggtatgaaaccggcggctggtatcccttcaacaaaaaagggtgcattgacgatccgaaatccaccgcggtggtcggcgcgatgctctgcctgctggcggagaagtcgcgtctcaacaacttctatttccgcgcggcaaactttaccgcctactcgacgatccgctacctcggcatgctggatggcaacaacgtcatcaaagacagcaacgtcttttacagcgatatcgacctcgatgccgctgacttccagctccctcagggccagccatttgaggcgcgcggtgaagtgcgtatcggtttccgccagctggataacgagcgctggccggcctcgtcgctttataccctgaaaatcaacaatccgaaccttgccagcgaactcgccggcgatgcggtgatgcgtattgagctgatggcggaacagggccgcgcgcgaaacggcgaagaggcggtcagcccggagcgtttccgtattgagtcgctggagatggagcacgccagacgaaactacagccgcaaggacgtgaccttccagttaaacacgatggttggcaatggcatgggcgaaagccagtactggctggatagcgggagcattaagagctaa

SEQ ID NO: 1081 - DNA, 2667 bp, Kosakonia cowanii
  source 1..2667: mol_type = genomic DNA
atgaacagcatcaattcgaagcaaattatccagggctggcagggcgttgaacgcggtgccggtgaagcgattgagtggatcaacgcggtgcgccaggatgcgccgcgtcttaataccgaagccgaccgtctgacgattaacctccgccgcagccgtaacaaggcgcgccgtctggcgctggcagcagcaaaaccgatgaccatcggcttctttggcctgtcgcaggcgggcaaatcctacctgatttccgcactggcggcgggtgaaaacggcaagctggagacccgcctcggcggtaagcagctcgattttctgacccacatcaacccgccgggcggtggcaaagaggcaaccggcctggtgacgcgctttagccgccgtcaggttggcggcgacgagcgctggccggtgacgctgcaactgtttagcgaaatcgagatgggcaaaattctcgccaacgcctttatccatgattttaatcaggaaaaatttgactggcagtatgacgaagggcgcatcaacgatctgctggcctcgctgaccaaacgccgtcgcccaacccgcgtggcgggcatcagtgaagatgatgtcgtctcgctgtgggattacctgagccgccatgcggaaaaaagccagagccgcttagcgctgcactactggccgcaggcgattacgctggcgccgtggctgacgccggaggatcgcggccagctcttctcggtgttatggggcgaggtggcagagctgaccgaagcctatatccgtttcgcgcaaaccctgcatcggctgggcggcgcgcaggaagtgtgggcaccgttaagcacgctggtcagcgaagagaatggcctgctggtgcagcgcgacagcattatgaatgtcgacatgctggagcggctgaataaagagaccgatatccgcattgaggtctgtccggtggtggagggccaggccgcagcgcccgtcaccctctcgctggcagaattaacggcattaaccgttgagttgcatattccgctggtcgcctcgacccgcgagccgctgtttgagaccgtcgatctgctcgatttccccggttatcgcgggcgcctcggcgttgagtcgatggatgatattcgccgcgcggtcaacagtgaagagagcaacccgctggcgcagctgattttacgtggcaaagtcgcttatctctttgagcgctataccgaaaaccaggagatgaacgtcctggtggtctgtacggcttccaccaagcagtcggatgttaaagaggtgggcggcgtgctcgatgagtggatccgctacacccagggcgctgacgccgaggcgcgcggccgccgtctgccggggctaatttgggcgctgaccatgttcgatctgcgcatcagccaggggctgtcgcaagaggaggcaatcctgcgacaatcctgggggctgggcgggatgatcaaaatggcaatgaccgagcgcttcggtcagtacaaatggatgcaggagtggcagcgcggacaggcgtttaacaacaccttccttgtgcgcaagccgcgccagcagacgccgtttattcgtattagcgacggtaacgaagcggcgtttagcgaagagaacctgccgcagctccagctaatgcgcaaaaccttccttgaagatgaagcggttaaccgctatatcgcctcgccggatgaagcctgggacgcgatgctcgagcttaacgacggcgggatgcgccgcatggctgattacctctcaaccgttgcgcgtccggaagtgaagctcgagcgcattgccgagcagttgcaggagatccgcgatgagctgatcgagggcggtttaggcaactggtatcagccagacggcgaagaggatgcggcgaaaaaggcgcagattgcccgcgacattctggatgtgctgaaaaaacgcagcggtatgcacggcgagctattgctgcgcctggtgccgacgcgccgcgatttgcaggcactctatctgcaacaaaccacactgccggtgcaggaagaggcgcctgaagagctggatattttcgatatcggcgtcggcgctgcctttggggcagaagcacctgcggcaacgacctatagccacgaaattgccttcgcgcatcagagcgtgcagcactggatcaaccatctacgcggcttgtcggaaagcgcggcgttgctcaactacatcaatttaccgcgcccgattatcgacgcgctggccgatgaactgattaccgccctgctccgtctgcgcatcgaagagaagctcgttgaggcgatgaccaataccgagcaggcaggcgtgttgctggagcagatggtggaccgtcaggtatcgcgcatcctgcatgtgatgggcgattttattacctggcttgggtacctcgagatgcccgcagcgaaacgcccgacacgcttgaatatgccggatcagcacattttcacccgcccctctcagtgcgacagcgtggtgtggaaagacgacgagcgtctggcgcgtttaacgccgcaacaactgaactacaccgccatgttcattatcgactggctggtgggactggagtcgctgattaccgagaacgcgggccactcggccggtcgggagatcagcgtggcgcagaacgaaaaactgggcgccatcatccgtcagattcagacttcacaggagtaa

SEQ ID NO: 1082 - DNA, 1281 bp, Kosakonia cowanii
  source 1..1281: mol_type = genomic DNA
atgataagaataacaaggatcgttaaaccttcagttgaattaaccgattatgccgcgtcattttcgccttttcgtacgctcctcgaaacctatttacccgcctctatccaaaatttatatgcccgcccggttatcgccgatgatggtgccgttgagtggtatagcgatattaatggtcagccgcgccgcttactcgatctgagtgaaaccgagcagagccgcgcccgcgcggtgctggaacagcgtctcgacagcgttcgggccctgcatcagaagctggcgcaaaacgggagcgagccagaaacaatgctgcgcctgctacaggcggccacccactctcctgcacctgagcaggtgtgggtgatcgacggccatccggtcatcgtcccacctgcggagggcgcgccccgcgccgctgctgccgccaccactgccgctgccgtctcaagccgtcgctggtggccgtggcttttacttctggctctgcttatcgccctgattctgttgctgctgtcacgctgttcgccactgcacgaaacagcagcacccgtcacgcccgcgccaccagctgtaacgcccggcgagccggtgaaacctgaaacgacacccgccccgcacgcgccggtaaaacccaccaaagcggtctgcccggcgcagcgaacccaacagcaagcccctgaaatggttgtgattatggacgcctccggttcgatggccatcaccatggatgccacgcaggatgagttgataagctggaaccaggggaaatatgtcgagaatatcgaacgtgaaccgcgccgtatctcgctggcgcgtaacgcggccaaaggcattattgacactatcccgcgcgatatgaacatcagcctggtggcggcggaaaactgccgtcaggtctccctgtcgcccagcttcccgtttgcccagcgatcggcgctgaaaaagcgcattgaaggtattcaaccggtcggtaaaacgcctctcgccgaagccttagcactggcgggcaaaaaagtggatggggttaaccgcgatgcgattattttgctggtttccgacggagatgaaacctgcggcggcgatccctgtcaggttgcccgcgagctgaaaaagagtaaaccgcgcctgcaggtgaatgtcgtcgatattatgagcaccggtgcaggaaattgtattgccagcagcaccggcggcaaagtttttgccgtcaacaatacccgggaatttaagcagatcatgaaaaaggcgatgcaagaatatattcctgagggctgcgaataa

SEQ ID NO: 1083 - DNA, 1407 bp, Kosakonia cowanii
  source 1..1407: mol_type = genomic DNA
gtgaaagagatgtttctgtgcagtgacaagctcaataaatatcagtcgatgggcgaaaacgggcaggctgtccatatttctgcgctgcagttgcgcgaaacccttcgcctgcgcaaacagagcgcggcggcagatgtgctcgccattccgcaaatcagtgaacacggcgaacgggttgactggtatgccccattttccggcgacgtcattccctggtcagcggccacggagagcgaacgtcaaagcgccttagcgcagctggaaaccacgcaggccacgttgcgccagctcagccaggatttcgcccagagcaaccagccggagcagcagctgtttggtaagctgctggaaaaaaccctgcaatttcccgatcccgagcatgtctggctggtcaacggcaagccggtgatcagcttctggggattcgtcaacgcccgccatcaggcacggatcgatccgctggactgcttacgtccgccgaaacccgttacgcccgcagccctacttcacagcgcgccgccggtcaacgaaccgctggtgacgccgccgaaacgtcgcggatggtggatcctgcccgcgtggttatgctggctgctaccgctgctgctgttagcgcttctgctgctgtggctgctgcgcggctgcgtacccggcgtcaccattcctggctttagcgttgagaaaccagcactgcctgatgcgcaccttccggttgcggagaatggcgccaccctccccgtcacctcctctgaacgtgttgttggcactaccgaaggcgttactgcgccagtggtgagcggcagcacgacgggcatcggcacgttgagcgatgaagagcgtgccacagctgccccggaaaacgccgccgcccttaacgatcccgccgtgccggtcgcgcctgaaacaggcagcgagcctgcgcaagctggcgttgagcccgtgacgccagaggcgcaggtgaacgacccggcgctggcggaacccaacgctactgcgggcaacgctaccgcgccggtagaggtgaaaaacccgttaagcctgccgccggaagcgctggcgcaggggcgtaccgattttcttaatggccaatggcgcgcaggcgcaggcatccaggatcagcgtaccggcaagccgctgagcctcaactaccagattaaagatggcaaaggtgaagtgcagatggtgcgcggcgatggcgtctcctgccgcggtgcggtcaatgccgccatccaggccggcaagctggccattaataaccagggtgaagcgcaatgtaccgatggctcggtttaccagatgccggagatcgtctgtgcgcccggtgctaagagcgttgccgactgtaaaggcagctacggcaccagtacccttttccccctttcgatgaagcaggaggcaagtaactaa

SEQ ID NO: 1084 - DNA, 3003 bp, Kosakonia cowanii
  source 1..3003: mol_type = genomic DNA
atgctggctgagctcactgattttaaaaaacaggtcaaacttatccgtgacagcgggattcagttcctcgacttcgctttctccctgcccgcgcgtaaagcctacggcgaatttctgcgccagcagggcgaaggtgcggtgctgcgccttatctacaacgagcgtgacgacaagtttcaggtcccgacgccagacggcgaaacgccgcgcaacgccgaaccggagtatgcgctggcgattgaagattccctgagcctttatgcagggatctggttgccgctgcccttctttcgcttcaacccgccgggcggcttttctcacgggccgactaactggtcgcgcgtgcagtttcatcaactgccggagccggacgagaaaggcaacacctggcgtgcaacgctgattttcgataccaaaatctttccagaccgcgaacatacacaatacctggcacccggcgaagatgatgtccgttccggggccggttttgcgctggcctgcttaccgcaccagatgggcgacttcctgactcttccatggattgaggagtggctgaacgatatctataccaggcaggcacacgctgtgctgcgtcagcaccctgaagacaccgaagagaagctggtgctgaaagagcatcaggcgcacttccttaacctgctcgaggtgctgaaaaagaccatcgccattccagaagtacaactcaatgacgtgaaaattcgtgataccgcgatccccgtcgacctggtgctggatattggcaactcacgcagctgcggcgtgctgattgaggagcatgcggcggataacaaaggcctctctcagctctatcagctgcaattgcgcgatctgagccagccgcagtttgtctataacgagccgtttgagagccgactggagttcgcgcaggcggagtttggcaagcaggacttctcatcgaaaagcgggcgcagcgacgcctttacctggccgaccatcggccgcgtcggcggtgaggctttccgcatggcggcgcagcgtttaggtaccgaaggctcaaccggcctctccagcccgaaacgctatctgtgggacgatcagccctactctccgggctggcgtttcagccaggcgtttgtcaaatcggatcgtgaaccgctggcgaccgccgccccgctgctctatatgctcaatgatcatggcaagctgttgattcgcctcaatgaagatgagcggatgccggtcttctcgccggtttacagccgcagttcattgatgaccatgatgctctcagaagtgctgagccaggcgttaatgcagatcaacagcccggcgcagcgcctgaagatgagccacgccagccatccacgtcgtttacgcaacgtgatcctgaccgtgccgccggcgatgccgaaaccagagcgcgccatctttgaagcctgcatgcatgacgctatccgcctggtgtggaaatcgctggagtgggaagagatggattacgacggcgaagagagcggcaatgcgaagcagccacaccccggcgtgcatgtgaagtgggatgaagcgacctgcggacagctggtctatctctataacgaaacgcagaccaattttggtggccgcaccgatgagttttttgccgccacccgtcgccccgataatcagcaggcggagggggaacaacgcagcctgaagatcgcctccatcgacattggcggtggcaccaccgatctggtgatcacccgctatacgctggatgacggtaaaggcattaacgtgcgcattacaccgaaacagctcttccgcgaaggctttaaagtggcgggcgacgacattctgctggatgtcatccgtctctatctccagccagccgtaaaagcggcgatgatgaaagtcggccacagcgatatcgcggcagagtcgatgatgtcgcagctgttcggcagtgaagcgatcgaagcgggcaagcaggtgctgcgccagcagttgacgctgcaaatcttctcaccgctggcgctggccattcttcatcgctatgaagagtacaagccggagagtggccgcgaagtcctcaactataccttccgcgaactgctcaccggcactacgcctaccgccaaagtgcaggattacgttaacgacgtggtgcgcaccggccagttggcgagcgaagcgctcttctcactgctcgatgtgccgttagaggtcgatctcgcccgtctgcataatgagtttatcgatccgcgcagcggccggatgaacatctgccatagcctgcgcgccctgtgtgaagtgctctggcactacaactgcgatgtgctgctgttaacgggccgcccttcacgcctgccgggcatccaggcactgattcgccagctccagccggtgccgccgacgcgggttctgccgctgcacgggtatgaaaccggcggctggtatcccttcaacaaaaaagggtgcattgacgatccgaaatccaccgcggtggtcggcgcgatgctctgcctgctggcggagaagtcgcgtctcaacaacttctatttccgcgcggcaaactttaccgcctactcgacgatccgctacctcggcatgctggatggcaacaacgtcatcaaagacagcaacgtcttttacagcgatatcgacctcgatgccgctgacttccagctccctcagggccagccatttgaggcgcgcggtgaagtgcgtatcggtttccgccagctggataacgagcgctggccggcctcgtcgctttataccctgaaaatcaacaatccgaaccttgccagcgaactcgccggcgatgcggtgatgcgtattgagctgatggcggaacagggccgcgcgcgaaacggcgaagaggcggtcagcccggagcgtttccgtattgagtcgctggagatggagaacgccagacgaaactacagccgcaaggacgtgaccttccagttaaacacgatggttggcaatggcatgggcgaaagccagtactggctggatagcgggagcattaagagctaa

SEQ ID NO: 1085 - DNA, 2667 bp, Kosakonia cowanii
  source 1..2667: mol_type = genomic DNA
atgaacagcatcaattcgaagcaaattatccagggctggcagggcgttgaacgcggtgccggtgaagcgattgagtggatcaacgcggtgcgccaggatgcgccgcgtcttaataccgaagccgaccgtctgacgattaagcttcgccgcagccgtaacaaggcgcgccgtctggcgctggcagcagcaaaaccgatgaccatcggcttctttggcctgtcgcaggcgggcaaatcctacctgatttccgcactggcggcgggtgaaaacggcaagctggagacccgcctcggcggtaagcggctcgattttctgacccacatcaacccgccgggcggtggtaaagaggcaaccggcctggtgacgcgttttagccgccgtcaggttggcggcgacgagcgctggccggtgacgctgcaactgtttagcgaaatcgagatgggcaaaattctcgccaacgcctttatccatgattttaatcaggaaaaatttgactggcagtatgacgaagggcgcatcagcgatctgttgaattcgctggccaaacgccgtcgcccaactcgcgtggcgggcatcagtgaagatgaggtcgtctcgctgtgggattacctgagccgccatgcggaaaaaagccagagccgcttagcgctgcactactggccgcaggcgattacgctggcaccgtggctgacgccggaggatcgcggccagctcttctcggtgttatggggcgaggtggcagggctgaccgaagcttatatccgttttgcgcaaaccctgcatcggctaggcggcgcgcaggaagtgtgggcaccgttaagcacgctggtcagcgaagagaatggcctgctggtgcagcgcgacagcattatgaatgtcgacatgctggagcggctaaatacagagaccgatatccgcattgaggtctgcccggtggtggagggccaggccgcagcgcccgtcaccctctcgctggcagaattaacggcattaaccgttgagttgcatatcccgctggtcgcctcgacccgcgagccgctgtttgagaccgtcgatctgctcgatttccccggttatcgcgggcgcctcggcgttgagtcgatggatgacactcgccgcgcggttaataacgaagagagcaacccgctggcgcagctgattttacgtggcaaagtcgcttatctctttgagcgctataccgaaaaccaggagatgaacgtcctggtggtctgtacagcctcgaccaagcagtcggatgtgaaagaggtgggcggcgtgctcgatgagtggatccgctacacccagggcgccgacgccgaggcgcgcggccgccgtctgccggggctaatttgggcgctgaccatgttcgatctgcgcatcagccaggggctgtcgcaagaggaggcaatcctgcgacaatcctgggggctgggcgggatgatcaaaatggcaatgaccgagcgcttcggtcagtacaaatggatgcaggagtggcagcgcggacaggcgtttaacaacaccttccttgtgcgcaagccgcgtcagcagacgccgtttattcgtattagcgacggtaacgaagcggcgtttagcgaagagaacctgccgcagctccagttgatgcgcaaaaccttccttgaagatgaagcggttaaccgctatatcgcctcgccggacgaagcctgggacgcgatgctcgagcttaacgacggcgggatgcgccgcatggctgattacctctcgaccgttgcgcgtccggaagtgaagctcgagcgcattgccgagcagttgcaggagatccgcgatgagctgatcgagggcggtttaggcaactggtatcagccagacggcgaagaggatgcggcgaaaaaggcgcagattgcccgcgacattctggatgtgctgaaaaaacgcagcggtatgcacggcgagctgttgctgcgcctggtgccgacgcgccgcgatttgcaggcactctatctgcaacaaaccacactgccggtgcaggaagaggcgcctgaagagctggatattttcgatatcggtgttggcgctgcctttggggctgaagcacctgcggcaacgacctatagccacgaaattgccttcgcgcatcagagcgtacagcactggatcaaccatctacgcggcttgtcggaaagcccggcgttgctcaactacatcaatttaccgcgcccgattatcgacgcgctggccgatgaactgattaccgccctgctccgtctgcgcgtcgaagagaagctcgttgaggcgatgaccaataccgagcaggcaggcgtgttgctggagcagatggtggaccgtcaggtgtcgcgcatcctgcatgtgatgggcgattttattacctggcttgggtacctcgagatgcccgcagcgaaacgcccgacacgcttgaatatgccggatcagcacattttcacccgcccctctcagtgcgacagcgtggtgtggaaagacgacgagcgcctggcacgtttaacgccgcaacaactgaactacaccgccatgttcattatcgactggctggtgggactggagtcgctgattaccgagaacgcgggccattcggccggtcgggagatcagcgtggcgcagaacgaaaaactgggcgccatcatccgtcagattcagacttcacaggagtaa

SEQ ID NO: 1086 - DNA, 1281 bp, Kosakonia cowanii
  source 1..1281: mol_type = genomic DNA
atgataagaataacaaggatcgttaaaccttcagttgaattaaccgattatgccgcgtcattttcgccttttcgtacgctcctcgaaacctatttacccgcctctatccaaaatttatatgcccgcccggttatcgccgatgatggtgccgttgagtggtatagcgatattaatggtcagccgcgccgcttactcgatctgagtgaaaccgagcagagccgcgcccgcgcgctgctggaacagcgtctcgacagcgttcgggcactgcatcagaagctggcgcaaaacgggagcgagccagaaacaatgctgcgcctgctacaggcggccacccactctcctgcacctgagcaggtgtgggtgatcgacggccatccggtcatcgttccacctgcggagggcgccccccgcgccgctgctgccgccaccactgccgctgccgtctcaagccgtcgctggtggccatggcttttacttctggcactgcttatcgccctgattctgttgctgctgtcacgctgttcgccactgcacgaaacagcagcacccgtcacgcccgcgccaccagctgtaacgcccggcgagccggtgaaacctgaaacgacacccgcgccgcacgcgccggtaaaacccaccaaagcggtctgcccggcgcagcgcacccaacagcaagcccctgaaatggtggtaattatggacgcctccggttcgatggctatcaccatggatgccacgcaggatgagttgatcagctggaaccaggggaaatatgtcgagaatatcgaacgtgaaccgcgccgtatctcgctggcgcgtaacgcggccaaaggcattattgacactatcccgcgcgatatgaacatcagcctggtggcggcggaaaactgccgtcaggtctccctgtcgcccagcttcccgtttgcccagcgatcggcgctgaaaaagcggattgaaggtattcaaccggtcggtaaaacgcctctcgccgaagccttagcactggcgggcaaaaaagtggatggggttaaccgcgatgcgattattttgctggtttccgacggagatgaaacctgcggcggcgatccctgtcaggttgcccgcgagctgaaaaagagtaaaccgcgcctgcaggtgaatgtcgtcgatattatgagcaccggtgcaggaaattgtattgccagcagcaccggcggcaaagtttttgccgtcaacaatacccgggaatttaagcagatcatgaaaaaggcgatgcaagaatatattcctgagggctgcgaataa

SEQ ID NO: 1087 - DNA, 1407 bp, Kosakonia cowanii
  source 1..1407: mol_type = genomic DNA
gtgaaagagatgtttctgtgcagtgacaagctcaataaatatcagtcgatgggcgaaaacgggcaggctgtccatatttctgcgctgcagttgcgcgaaacccttcgcctgcgcaaacagagcgcggcggcagatgtgctcgccattccgcaaatcagtgaacacggcgaacgggttgactggtatgccccattttccggcgacgtcattccctggtcagcggccacggagagcgaacgtcaaagcgccttagcgcaactggaaaccacgcaggccacgttgcgccagctcagccaggatttcgcccagagcaaccagccggagcagcagctgtttggtaagctgctggaaaaaaccctgcaatttcccgatcccgagcatgtctggctggtcaacggcaagccggtgatcagcttctggggattcgtcaacgcccgccatcaggcacggatcgatccgctggactgcttacgtccgccgaaacccgttacgcccgcagccccacttcacagcgcgccgccggtcaacgaaccgctggtgacgccgccgaaacgtcgcggatggtggatcctgcccgcgtggttatgctggctgctaccgctactgctgttagcatttctgctgctgtggctgctgcgcggctgcgtacccggcgtcaccattcctggctttagcgttgagaaaccggcgcttcctgacgtgcatcttccggttgcggagaatggcgccaccctgcccgtcacctcctctgaacgtgttgttggcaccaccgaaggcgttactgcgccagtggtgagcggcagcacgacgggcatcggcccattgagtgatgaagagcgtgccacagctgccccggaaaacgccgccgcccttaacgatcctgccgtgccggtcgcgcctgaaacaggcagcgagcctgcgcaagctggcgttgagcccgtgacgccagaggcgcaggtgaacgacccggcgctggcggaacccaacgctactgcgggcaacgctaccgcgccggtagaggtgaaaaacccgttaagcctgccgccggaagcgctggcgcaggggcgtaccgatttccttaatggccaatggcgcgcaggcgcaggcatccaggatcagcgtaccggcaagccgctgagcctcaactaccagattaaagatggcaaaggtgaagtgcagatggtgcgcggcgatggcgtctcctgccgcggtgcggtcaatgccgcaatccaggccggcaagctggccattaataaccagggtgaagcgcaatgtaccgatggctcggtttaccagatgccggagatcgtctgtgcgcccggtgctaagagcgttgccgactgtaaaggcagctacggcaccagtacccttttccccctttcgatgaagcaggaggcaagtaactaa

SEQ ID NO: 1088 - DNA, 3003 bp, Kosakonia cowanii
  source 1..3003: mol_type = genomic DNA
atgctggctgagctcactgattttaaaaaacaggtcaaacttatccgtgacagcgggattcagttcctcgacttcgctttctccctgcccgcacgtaaagcctacggcgagtttctgcgccagcagggcgaaggtgcagtgctgcgccttatctacaacgagcgtgacgacaagtttcaagtcccgacgccagacggcgaaacgccgcgcaacgccgaaccggagtatgcgctggcaattgaagattccctgagcctttatgcagggatctggttgccgctgcccttctttcgcttcaacccgccgggcggcttttctcacgggccgactaactggtcgcgcgtgcagtttcatcaactgccggagccggacgagaaaggcaacacctggcgtgcaacgctgattttcgatacaaaaatctttcccgaccgcgaacatacacaatacctggcacccggcgaagatgatgtccgttccggggccggttttgcgctggcctgcttaccacaccagatgggcgacttcctgactcttccatggattgaggagtggctgaacgatatctataccaggcaggcacacgctgtgctgcgtcagcaccctgaagacaccgaagagaagctggggctgaaagagcatcaggcgcacttccttaacctgctcgaggtgctgaaaaagaccatcgtcattccagaagtacagctcaatgacgtgaaaattcgtgataccgcgatccccgtcgacctggtgctggatattggcaactcacgcagctgcggcgtgctgattgaggagcatgcggcggataacaaaggcctctctcagctctatcagctgcaattgcgcgatctgagccagccgcagtttgtctataacgagccatttgagagccgactggagtttgcgcaggcggagtttggcaagcaggacttctcatcgaaaagcgggcgcagcgacgcctttacctggccgaccatcggccgcgtcggcggtgaggctttccgcatggcggcgcagcgtttaggtaccgaaggctcaaccggcctctccagcccgaaacgctatctgtgggacgatcagccctactcgccgggctggcgtttcagccaggcgtttgtcaaatcggatcgtgaaccgctggcgaccgccgccccgctgctctatatgctcaatgatcatggcaagctgttgattcgcctcaatgaagatgagcggatgccggtcttctcgccggtttacagccgcagttcattgatgaccatgatgctctcagaggtgctgagccaggcgttaatgcagatcaacagcccggcgcagcgcctgaagatgagccacgccagccatccacgtcgtttacgcaacgtgatcctgaccgtgccgccggcgatgccgaaaccagagcgcgccatctttgaagcctgcatgcatgacgctatccgcctggtgtggaaatcgctggagtgggaagagatggattacgacggcgaagagagcggcaatgcgaagcagccacaccccggcgtgcatgtgaagtgggatgaagcgacctgcggacagctggtctatctctataacgaaacgcagaccaattttggtggccgcaccgatgagttttttgccgccacccgtcgccccgataatcagcaggcggagggggaacaacgcagcctgaagatcgcctcgatcgacattggcggtggcaccaccgatctggtgatcacccgctatacgctggatgacggtaaaggcattaacgtgcgcattacaccgaaacagctcttccgcgaaggctttaaagtggcgggcgacgacattctgctggatgtcatccgtctctatctccagccagccgtaaaagcggcgatgatgaaagtcggccacagcgatatcgcggcagagtcgatgatgtcgcagctcttcggcagtgaagcgatcgaagcgggcaagcaggtgctgcgccagcagttgacgctgcaaatcttctcaccgctggcgctggccattcttcatcgctatgaagagtacaagccggagagtggccgcgaagtcctcaactataccttccgcgaactgctcaccggcactacgcctaccgccaaagtgcaggattacgttaacgacgtggtgcgcaccggccagttggcgagcgaagcgctcttctcactgctcgatgtgccgttagaggtcgatctcgcccgtctgcataatgagtttatcgatccgcgcagcggccggatgaacatctgccatagcctgcgcgccctgtgtgaagtgctctggcactacaattgtgatgtgctgctgttaacgggccgcccttcacgcctgccgggcatccaggcactgattcgccagctccagccggtgccgccgacgcgggttctgccgctgcacgggtatgaaaccggcggctggtatcccttcaacaaaaaagggtgcattgacgatccgaaatccaccgcggtggtcggcgcgatgctctgcctgctggcggagaagtcgcgtctcaacaacttctatttccgcgcggcaaactttaccgcctactcgacgatccgctacctcggcatgctggatggcaacaacgtcatcaaagacagcaacgtcttttacagcgatatcgacctcgatgccgctgacttccagctgcctcagggcctgccatttgaggcgcgcggtgaagtgcgtatcggtttccgccagctggataacgagcgctggccggcctcgtcgctttataccctgaaaatcaacaatccgaaccttgccagcgaactcgccggcgatgcggtgatgcgtattgagctgatggcggaacagggccgcgcgcgaaacggcgaagaggcggtcagcccggagcgtttccgtattgagtcgctggagatggagaacgccagacgaaactacagccgcaaggacgtgaccttccagttaaacacgatggttggcaatggcatgggcgaaagccagtactggctggatagcgggagcattaagagctaa

SEQ ID NO: 1089 - DNA, 2667 bp, Kosakonia cowanii
  source 1..2667: mol_type = genomic DNA
atgaacagcatcaattcgaagcaaattatccagggctggcagggcgttgaacgcggtgccggtgaagcgattgagtggatcaacgcggtgcgccaggatgcgccgcgtcttaataccgaagccgaccgtctgacgattaacctccgccgcagccgtaacaaggcgcgccgtctggcgctggcagcagcaaaaccgatgaccatcggcttctttggcctgtcgcaggcgggcaaatcctacctgatttccgcactggcggcgggtgaaaacggcaagctggagacccgcctcggcggtaagcagctcgattttctgacccacatcaacccgccgggcggcggcaaagaggcaaccggcctggtgacgcgctttagccgccgtcaggttggcggcgacgagcgctggccggtgacgctgcaactgtttagcgaaatcgagatgggcaaaattctcgccaacgcctttatccatgattttaatcaggaaaaattcgactggcagtatgacgaagggcgcatcagcgatctgttgaattcgctggccaaacgccgtcgcccaacccgcgtggcgggcatcagtgaagatgaggtcgtctcgctgtgggattacctgagccgccatgcagaaaaaagccagagccgcttagcgctgcactactggccgcaggcgattacgctggcaccgtggttgacgccggaggatcgcggtcagctcttctcggtgttatggggcgaggtcgcagagttgaccgaagcctatatccgtttcgcgcaaaccctgcaccggctgggcggcgcgcaggaagtgtgggcgccgttaagcacgctggtcagtgaagagaatggcctgctggtgcagcgcgacagcattatgaatgtcgacatgctggagcggctgaacaaagagaccgatatccgcattgaggtctgcccggtggtggaaggccaggctgcagcgcccgtcaccctctcgctggcagaattaacggcattaaccgttgagttgcatatcccgctggtcgcctcgacccgcgagccgctgtttgagaccgtcgatctgctcgatttccccggttatcgcgggcgcctcggcgttgagtcgatggatgatattcgccgcgcggtcaacagtgaagagagcaacccgctggcgcagctgattttacgtggaaaagtcgcttatctctttgagcgctataccgaaaaccaggagatgaacgtcctggtggtctgtacggcttccaccaagcagtcggatgtgaaagaggtgggcggcgtgctcgatgagtggatccgctacacccagggcgccgacgccgaggcgcgcggccgccgtctgccggggctaatttgggcgctgaccatgttcgatctgcgcatcagccaggggctgtcgcaagaggaggcaatcctgcgacaatcctgggggctgggcgggatgatcaaaatggcaatgaccgagcgcttcggtcagtacaaatggatgcaggagtggcagcgcggacaggcgtttaacaacaccttccttgtgcgcaagccgcgccagcagacgccgtttattcgtattagcgacggtaacgaagcggcgtttagcgaagagaacctgccgcagctccagctaatgcgcaaaaccttccttgaagatgaagcggttaaccgctatatcgcctcgccggatgaagcctgggacgcgatgctcgagcttaacgacggcgggatgcgccgcatggctgattacctttcgaccgttgcgcgtccggaagtgaagctcgagcgcattgccgagcagttgcaggagatccgcgatgagctgatcgagggcggtttaggcaactggtatcagccagacggcgaagaggatgcggcgaaaaaggcgcagattgcccgcgacattctggatgtgctgaaaaaacgcagcggtatgcacggcgagctgttgctgcgcctggtgccgacgcgccgcgatttgcaggcactctatctgcaacaaaccacactgccggtgcaggaagaggcacctgaagagctggatattttcgatatcggtgttggcgctgcctttggggctgaagcacctgcggcaacgacctatagccacgaaattgccttcgcgcatcagagcgtgcagcactggatcaaccatctacgcggcttgtcggaaagcccggcgttgctcaactacatcaatttaccgcgcccgattatcgacgcgctggccgatgaactgattaccgccctgctccgtctgcgcgtcgaagagaagctcgttgaggcgatgaccaataccgagcaggcaggcgtgctgctggagcagatggtggaccgtcaggtgtcgcgcatcctgcatgtgatgggcgattttattacctggcttgggtacctcgagatgcccgcagcgaaacgcccgacacgcttgaatatgccggatcagcacattttcacccgcccctctcagtgcgacagcgtggtgtggaaagacgacgagcgcctggcgcgtttaacgccgcaacaactgaactacaccgccatgttcattatcgactggctggtgggactggagtcgctgattaccgagaacgcgggccactcggccggacgggagatcagcgtggcgcagaacgaaaaactgggcgccatcatccgtcagattcagacttcacaggagtaa

SEQ ID NO: 1090 - protein, 241 aa, Kosakonia cowanii
MAVINTNTLSLMTQNNLTKSQSSLGTSIERLSSGLRINSAKDDAAGQAIANRFTSNINGLTVAARNANDGISLAQTAEGALSEINNNLQRIRDLTVQAQNSSNSASDIDSIQAEVNQRMEEVNRVTTQTDFNGIKVLNTGTGSSSYSFQVGAKDNETISISLTKSDSYNLYNATSQNRFESTITNLNNTVSNLSAARSRIQDSDYATEVSNMSRAQILQQAGSSVLAQANQVPQTMLSLLR

SEQ ID NO: 1091 - protein, 130 aa, Kosakonia cowanii
MAVINTNTLSLMTQNNLTKSQSSLGTSIERLSSGLRINSAKDDAAGQAIANRFTSNINGLTVAARNANDGISLAQTAEGALSEVNNNLQRIRDLTVQAQNSSNSASDIDSIQAEVNQRMEEINRVTTQTD

SEQ ID NO: 1092 - protein, 132 aa, Kosakonia cowanii
MLNTGTGSSSYSFQVGAKDNETISISLTKSDSYNLYNATGATAATTGQTINGNKRSTAAEGFDVLKGTVDASGNTDGSPLADIDKAIKAVDDQRSMLGASQNRFESTITNLNNTVSNLSAARSRIQDSDYAT

SEQ ID NO: 1093 - protein, 207 aa, Kosakonia cowanii
QTDFNGIKVLNTGTGSSSYSFQVGAKDNETISISLTKSDSYNLYNATGATAQTTGQTINGNKRSTAAEGFDVLQGTVDASGKTNGGPLADIDSAIKAVDDQRSLLGASQNRFESTITNLNNTVSNLSAARSRIQDSDYATEVSNMSRAQILQQAGSSVLAQANQVPQTMLVPAALIRRHQLYRKSAACRRFFIFCAVRFFDDFRAKV

SEQ ID NO: 1094 - protein, 314 aa, Kosakonia cowanii
  SITE 107: note = misc_feature - Xaa can be any naturally occurring amino acid
MAVINTNTLSLMTQNNLTKSQSSLGTSIERLSSGLRINSAKDDAAGQAIANRFTSNINGLGVAARNANDGISLAQTAEGALSEINNNLQRIRDLTVQAQNSSNSASXQTDFNGIKVLNTGTGSSSYSFQVGAKDNETISISLTKSDSYNLYNATGATAQTTGQTINGNKRSTAAEGFDVLQGTVDASGKTNGGPLADIDSAIKAVDDQRSLLGASQNRFESTITNLNNTVSNLSAARSRIQDSDYATEVSNMSRAQILQQAGSSVLAQANQVPQTMLVPAALIRRHQLYRKSAACRRFFIFCAVRFFDDFRAKV

SEQ ID NO: 1095 - protein, 331 aa, Kosakonia cowanii
  SITE 268: note = misc_feature - Xaa can be any naturally occurring amino acid
MAVINTNTLSLMTQNNLTKSQSSLGTSIERLSSGLRINSAKDDAAGQAIANRFTSNINGLTVAARNANDGISLAQTAEGALSEVNNNLQRIRDLTVQAQNSSNSASDIDSIQAEVNQRMEEINRVTTQTDFNGIKVLNTGTGSSSYNFQVGSKDNETISISLSKSDSYNLYNATGATAVTTTQTINGNARSTSAEGFDVLKGTVDSTGGTNGAPLADIDAAIKAVDDQRSMLGASQNRFESTITNLNNTVSNLSAARSRIQDSDYATXSVEHVPRADPAAGRFFRAGAGQPGSADHAVPAALIRRHCCTEKRRLSALFFISTAITPDNRQI

SEQ ID NO: 1096 - protein, 267 aa, Kosakonia cowanii
MAVINTNTLSLMTQNNLTKSQSSLGTSIERLSSGLRINSAKDDAAGQAIANRFTSNINGLTVAARNANDGISLAQTAEGALSEVNNNLQRIRDLTVQAQNSSNSASDIDSIQAEVNQRMEEINRVTTQTDFNGIKVLNTGTGSSSYNFQVGSKDNETISISLSKSDSYNLYNATGATAVTTTQTINGNARSTSAEGFDVLKGTVDSTGGTNGAPLADIDAAIKAVDDQRSMLGASQNRFESTITNLNNTVSNLSAARSRIQDSDYAT

SEQ ID NO: 1097 - protein, 301 aa, Kosakonia cowanii
MAVINTNTLSLMTQNNLTKSQSSLGTSIERLSSGLRINSAKDDAAGQAIANRFTSNINGLTVAARNANDGISLAQTAEGALSEVNNNLQRIRDLTVQAQNSSNSASDIDSIQAEVNQRMEEINRVTTQTDFNGIKVLNTGTGSSSYNFQVGSKDNETISISLSKSDSYNLYNATGATAVTTTQTINGNARSTSAEGFDVLKGTVDSTGGTNGAPLADIDAAIKAVDDQRSMLGASQNRFESTITNLNNTVSNLSAARSRIQDSDYATEVSNMSRAQILQQAGSSVLAQANQVPQTMLSLLR

SEQ ID NO: 1098 - protein, 307 aa, Kosakonia cowanii
MRLSTSYIFQNRIDSLGDAMTGYNDLATRLSAGQTLLKPSDDPTGASQSVTLQTALSRMSQFDTARTYAQDALGQEDNTLDSIGNLLTENLTQKVIAGGNGAYSDEDRAALAEELQGIRDNLLDLANTKNSDGRYIFAGYKTGSAPFQADGTYVGGDTAMTQVVSDSTEMQVGHTGSEVFMSGTPDDLFEALDNAIAQLKQPVTSDADRDALQAVLDDSNVSIKKNIDNLGKVRATVGTNMQQIESLGFSAEAQSINVQSRLQETLGSDWDSMITLLSQSKMSEFALNSSMTVFQSMQQLSIFKVMG

SEQ ID NO: 1099 - protein, 302 aa, Kosakonia cowanii
MAVINTNTLSLINQNNLNKSQAAQSSAIQRLSSGLRINSAKDDAAGQAIANRFSSSISGMGVAARNANDAISLAQTAEGALSEINNNLQRIRDLAVQAQNSTNSASDVDSIQSEVNERMAEINRVTLQTDFNGIKILNTSSGTASYGFHVGTDDGEEIVITMSSSDDYNLGANSGSIGQVSGEFIHGNARSVKAVGFDVLHGTVTPFSGAILNNPLAAIDDAIKAVDTQRSSLGAFQNRFESTINNLNQAATNLSAARSRINDADYGTEVSNMSRAQILQQAGSSVLAQANQVPQTMLSLLR

SEQ ID NO: 1100 - protein, 417 aa, Kosakonia cowanii
MSQVINTNALSLVAQNNLNKSQDSLGTAIERLSSGLRINSAKDDAAGQAISNRFTANINGLTQASRNANDGISIAQTTEGALNEINDNLQNIRRLSVQAQNGTNSDSDRQSIQDEIDARLDEINRISEQTEFNGVKVLSKDQKLSIQVGSNDGQTIDIELNQMDSSTLGMDGFSVANGIDTTTLTASTGTVKVDSGFDYDAAKFTDSGATAATSIDDIVVDDNGDVFAVKGAEMYAVTEDPTTGEISFNSDNDVASSVVGTPTSVVGEDMMKDQAINMTGITGTLMEDGKGNYYVDDGAGNLTEATIDTTTWTATDTGKAVSTTPATSDPLTKIDEALAQVDEMRSGLGAVQNRFASVISNLNNTVNNLSESRSRILDADFASEVSEMSRANILQSAGTTVLAQANQVPQNVLSLLG

SEQ ID NO: 1101 - protein, 111 aa, Kosakonia cowanii
MAVINTNTLSLTTQNNLTKSQSSLGTAIERLSSGLRINSAKDDAAGQAIANRFTSNINGLGVAARNANDGISLSQTAEGALGEINNNLQRIRDLTVQAQNSSNSASDIDSI

SEQ ID NO: 1102 - protein, 121 aa, Kosakonia cowanii
MAVINTNTLSLMTQNNLTKSQSSLGTSIERLSSGLRINSAKDDAAGQAIANRFTSNINGLGVAARNANDGISLAQTAEGALSEVNNNLQRIRDLTVQAQNSSNSASDIDSIQAEVNQRMEE

SEQ ID NO: 1103 - protein, 307 aa, Kosakonia cowanii
MRLSTSYIFQNRIDSLGDAMTGYNDLATRLSAGQTLLKPSDDPTGASQSVTLQTALSRMSQFDTARTYAQDALGQEDNTLDSIGNLLTENLTQKVIAGGNGAYSDEDRAALAEELQGIRDNLLDLANTKNSDGRYIFAGYKTGSAPFQADGSYVGGDTAMTQVVSDSTEMQVGHTGSEVFLSGTPDDLFQALDSAIAQLKQPVTSDADRDALQAVLDDANVSIKKNIDNLGKVRATVGTNMQQIESLGFSAEAQSINVQSRLQETLGSDWDSMITLLSQSKMSEFALNSSMTVFQSMQQLSIFKVMG

SEQ ID NO: 1104 - protein, 121 aa, Kosakonia cowanii
MAVINTNTLSLMTQNNLTKSQSSLGTSIERLSSGLRINSAKDDAAGQAIANRFTSNINGLTVAARNANDGISLAQTAEGALSEVNNNLQRIRDLTVQAQNSSNSASDIDSIQAEVNQRMEE

SEQ ID NO: 1105 - protein, 302 aa, Kosakonia cowanii
MAVINTNTLSLINQNNLNKSQAAQSSAIQRLSSGLRINSAKDDAAGQAIANRFSSSINGMGVAARNANDAISLAQTAEGALSEINNNLQRIRDLAVQAQNSTNSASDVDSIQSEVNERMAEINRVTLQTDFNGIKILNTSSGAASYGFHVGTDDGEEIVITMSSSDDYNLGANSGSIGQVSGEFIHGNARSVKAIGFDVLHGTVTPFSGAILNNPLAAIDDAIKAVDTQRSSLGAFQNRFESTINNLNQAATNLSAARSRINDADYGTEVSNMSRAQILQQAGSSVLAQANQVPQTMLSLLR

SEQ ID NO: 1106 - protein, 417 aa, Kosakonia cowanii
MSQVINTNALSLVAQNNLNKSQDSLGTAIERLSSGLRINSAKDDAAGQAISNRFTANINGLTQASRNANDGISIAQTTEGALNEINDNLQNIRRLSVQAQNGTNSDSDRQSIQDEIDARLDEINRISEQTEFNGVKVLSKDQKLSIQVGSNDGQTIDIELNQMDSSTLGMDGFSVANGIDTTTLTASTGTVKVDSGFDYDAAKFTDGGATAVTSIDDIVVDDNGDVFAVKGAEMYAVTEDPTTGEISFNSDNDVASSVVGTPTSVVGEDMMKDQAINMTGITGTLMEDGQGNYYVDDGAGNLTEATIDTTTWTATDTGKAVSTTPATSDPLTKIDEALAQVDEMRSGLGAVQNRFASVISNLNNTVNNLSESRSRILDADFASEVSEMSRANILQSAGTTVLAQANQVPQNVLSLLG

SEQ ID NO: 1107 - protein, 248 aa, Kosakonia cowanii
MEEVNRVTNQTDFNGIKVLNTGSGTSTYNFQVGSKDGEKIGIDISSSDSYNLAAAGSSGTALNTKAMASGDTVNGTQRQTQAVGFDVLKGKVTGGASGSASGTTPLADIDAAIKSVDSQRSLLGASQNRFESTITNLNNTVSNLSSAPQPYSGLRLCDRSVEHVPRADPAAGWFFRAGAGQPGSADHAVPAALITQCLIKPGLAGFFFALFLARQTPGMGAFCMLHRILSQADFVIGYVNFPPLSITV

SEQ ID NO: 1108 - protein, 227 aa, Kosakonia cowanii
QTAEGALSEVNNNLQRIRDLTVQAQNSSNSASDIDSIQAEVNQRMEEINRVTTQTDFNGIKVLNTGTGSSSYSFQVGAKDNETISISLTKSDSYNLYNATGATAATTGQTINGNKRATAAEGFDVLKGTVDASGKTNGAPLADIDAAIKAVDDQRSLLGASQNRFESTITNLNNTVSNLSAARSRIQDSDYATEVSNMSRAQILQQAGSSVLAQANQVPQTMLSLLR

SEQ ID NO: 1109 - protein, 102 aa, Kosakonia cowanii
TNTLSLMTQNNLTKSQSSLGTSIERLSSGLRINSAKDDAAGQAIANRFTSNINGLGVAARNANDGISLAQTAEGALSEVNNNLQRIRDLTVQAQNSSNSASD

SEQ ID NO: 1110 - protein, 301 aa, Kosakonia cowanii
MAVINTNTLSLMTQNNLTKSQSSLGTSIERLSSGLRINSAKDDAAGQAIANRFTSNINGLTVAARNANDGISLAQTAEGALSEINNNLQRIRDLTVQAQNSSNSASDIDSIQAEVNQRMEEVNRVTTQTDFNGIKVLNTGTGSSSYSFQVGAKDSETISISLTKSDSYNLYNATGATAATTGQTINGNKRSTAAEGFDVLKGTVDASGNTDGSPLADIDKAIKAVDDQRSLLGASQNRFESTITNLNNTVSNLSAARSRIQDSDYATEVSNMSRAQILQQAGSFVLAQANQVPQTMLSLLR

SEQ ID NO: 1111 - protein, 122 aa, Kosakonia cowanii
GALSEVNNNLQRIRDLTVQAQNSSNSASDIDSIQAEVNQRMEEINRVTTQTDFNGIKVLNTGTGSSSYSFQVGSKDSETISISLTKSDSYNLYNATGATAQTTGQTINGNKRSTAAEGFDVL

SEQ ID NO: 1112 - protein, 111 aa, Kosakonia cowanii
MAVINTNTLSLMTQNNLTKSQSSLGTSIERLSSGLRINSAKDDAAGQAIANRFTSNINGLSVAARNANDGISLSQTAEGALGEINNNLQRIRDLTVQAQNSSNSASDIDSI

SEQ ID NO: 1113 - protein, 99 aa, Kosakonia cowanii
KISGAAAGTVYPLKDIDAAIKAVESQRSSLGASQNRFESTITNLSNTVINLSAARSRIQDSAYATEVSNMSRAQILQQAGSSVLAQPNQVPQTMLSLLR

SEQ ID NO: 1114 - protein, 267 aa, Kosakonia cowanii
MAVINTNTLSLMTQNNLTKSQSSLGTSIERLSSGLRINSAKDDAAGQAIANRFTSNINGLSVAARNANDGISLSQTAEGALGEINNNLQRIRDLTVQAQNSSNSASDIDSIQAEVNQRMEEVNRVTSQTDFNGIKVLNTGSGTSTYNFQVGAKDGEKIGIDISSSDNYNLAAAGSSGTALNTKAMASGDTINGTQRQTQAVGFDVMHGKVTGGASGTASGSTPLADIDAAIKSVDSQRSLLGASQNRFESTITNLNNTVSNLSSARS

SEQ ID NO: 1115 - protein, 181 aa, Kosakonia cowanii
QTAEGALSEVNNNLQRIRDLTVQAQNSSNSASDIDSIQAEVNQRMEEINRVTTQTDFNGIKVLNTGTGSSSYSFQVGSKDSETISISLTKSDSYNLYNATGATAQTTGQTINGNKRSTAAEGFDVLKGTVDASGSTDGSPLADIDKAIKAVDDQRSLLGASQNRFESTITNLNNTVSNLSA

SEQ ID NO: 1116 - protein, 169 aa, Kosakonia cowanii
MAVINTNTLSLMTQNNLTKSQSSLGTSIERLSSGLRINSAKDDAAGQAIANRFTSNINGLTVAARNANDGISLAQTAEGALSEINNNLQRIRDLTVQAQNSSNSASDIDSIQAEVNQRMEEVNRVTTQTDFNGIKVLNTGTGSSSYSFQVGAKDNETISISLTKSDSYN

SEQ ID NO: 1117 - protein, 169 aa, Kosakonia cowanii
MAVINTNTLSLMTQNNLTKSQSSLGTSIERLSSGLRINSAKDDAAGQAIANRFTSNINGLGVAARNANDGISLAQTAEGALSEVNNNLQRIRDLTVQAQNSSNSASDIDSIQAEVNQRMEEINRVTTQTDFNGIKVLNTGTGSSSYSFQVGAKDNETISISLTKSDSYN

SEQ ID NO: 1118 - protein, 225 aa, Kosakonia cowanii
MAVINTNTLSLMTQNNLTKSQSSLGTSIERLSSGLRINSAKDDAAGQAIANRFTSNINGLTVAARNANDGISLAQTAEGALSEVNNNLQRIRDLTVQAQNSSNSASDIDSIQAEVNQRMEEINRVTTQTDFNGIKVLNTGTGSSSYSFQVGSKDSETISISLTKSDSYNLYNATGATAQTTGQTINGNKRSTAAEGFDVLKGTVDASGNTDGSPLADIDKAIKAV

SEQ ID NO: 1119 - protein, 100 aa, Kosakonia cowanii
KISISLSSSNAYNLYNATGATAQTTGQTINGNARATAAEGFDVLQGTVSSGGTTDGSPLADIDAAIKSVDSQRSLLGASQNRFESTITNLNNTVSNLSSA

SEQ ID NO: 1120 - protein, 417 aa, Kosakonia cowanii
MSQVINTNALSLVAQNNLNKSQDSLGTAIERLSSGLRINSAKDDAAGQAISNRFTANINGLTQASRNANDGISIAQTTEGALNEINDNLQNIRRLSVQAQNGTNSDSDRQSIQDEIDARLDEINRISEQTEFNGVKVLSKDQKLSIQVGSNDGQTIDIELNQMDSSTLGMDGFSVANGIDTTTLTASTGTVKVDSGFDYDAAKFTDGGATAVTSIDDIVVDDNGDVFAVKGAEMYAVTEDPTTGEISFNSDNDVASSVVGTPTSVVGEDMMKDQTVDMTGITGTLMEDGQGNYYVDDGAGNLTEATIDTTTWTATDTGKAVSTTPATSDPLTKIDEALAQVDEMRSGLGAVQNRFASVISNLNNTVNNLSESRSRILDADFASEVSEMSRANILQSAGTTVLAQANQVPQNVLSLLG

SEQ ID NO: 1121 - protein, 160 aa, Kosakonia cowanii
LQRIRDLTVQAQNSSNSASDIDSIQAEVNQRMEEVNRVTTQTDFNGIKVLNTGTGTSSYSFQVGAKDNETISIGLSSSNAYNLYNATGATAQTTGQTINGNARATAAEGFDVLKGTVSSGGATDGSPLADIDAAIKSVDSQRSLLGASQNRFESTITNLN

SEQ ID NO: 1122 - protein, 133 aa, Kosakonia cowanii
MAVINTNTLSLTTQNNLTKSQSSLGTAIERLSSGLRINSAKDDAAGQAIANRFTSNINGLGVAARNANDGISLAQTAEGALGEINNNLQRIRDLTVQAQNSSNSASDIDSIQAEVNQRMEEVNRVTTQTDFNG

SEQ ID NO: 1123 - protein, 143 aa, Kosakonia cowanii
MAVINTNTLSLTTQNNLTKSQSSLGTAIERLSSGLRINSAKDDAAGQAIANRFTSNINGLGVAARNANDGISLAQTAEGALGEINNNLQRIRDLTVQAQNSSNSASDIDSIQAEVNQRMEEVNRVTTQTDFNGIKVLNTGTGS

SEQ ID NO: 1124 - protein, 302 aa, Kosakonia cowanii
MAVINTNTLSLINQNNLNKSQAAQSSAIQRLSSGLRINSAKDDAAGQAIANRFSSSINGMGVAARNANDAISLAQTAEGALSEINNNLQRIRDLAVQAQNSTNSASDVDSIQSEVNERMAEINRVTRQTDFNGIKILDSGSGSFGYGFQVGADDGEEIVLTIGGSDDYNLGANSGSIGEVSGEFIHGSARSVKAMGFDVLHGTVTPYSGAILNNPLAAIDDAIKAVDTQRSSLGAFQNRFESTINNLNQAANSLSAARSRINDADYGTEVSNMSRAQILQQAGSSVLAQANQVPQTMLSLLR

SEQ ID NO: 1125 - protein, 301 aa, Kosakonia cowanii
MAVINTNTLSLMTQNNLTKSQSSLGTAIERLSSGLRINSAKDDAAGQAIANRFTSNINGLSVAARNANDGISLAQTAEGALGEINNNLQRIRDLTVQAQNSSNSASDVDSIQAEVNQRMEEINRVTTQTDFNGIKVLNTGTGTSSYSFQVGAKDNETISISLSSSNAYNLYNATGATAQTTGQTINGNARATAAEGFDVLQGTVSSGGVTNGSPLADIDAAIKSVDSQRSLLGASQNRFESTITNLNNTVSNLSSARSRIQDSDYATEVSNMSRAQILQQAGSSVLAQANQVPQTMLSLLR

SEQ ID NO: 1126 - protein, 301 aa, Kosakonia cowanii
MAVINTNTLSLMTQNNLTKSQSSLGTSIERLSSGLRINSAKDDAAGQAIANRFTSNINGLTVAARNANDGISLAQTAEGALSEINNNLQRIRDLTVQAQNSSNSASDIDSIQAEVNQRMEEVNRVTTQTDFNGIKVLNTGTGSSSYSFQVGAKDSETISISLTKSDSYNLYNATGATAATTGQTINGNKRSTAAEGFDLLKGTVDASGNTDGSPLADIDKAIKAVDDQRSLLGASQNRFESTITNLNNTVSNLSAARSRIQDSDYATEVSNMSRAQILQQAGSSVLAQANQVPQTMLSLLR

SEQ ID NO: 1127 - protein, 277 aa, Kosakonia cowanii
MAVINTNTLSLMTQNNLTKSQSSLGTSIERLSSGLRINSAKDDAAGQAIANRFTSNINGLTVAARNANDGISLAQTAEGALSEVNNNLQRIRDLTVQAQNSSNSASDIDSIQAEVNQRMEEINRVTTQTDFNGIKVLNTGTGSSSYNFQVGSKDNETISISLSKSDSYNLYNATGATAVTTTQTINGNARSTSAEGFDVLKGTVDSTGGTNGAPLADIDAAIKAVDDQRSMLGASQNRFESTITNLNNTVSNLSAARSRIQDSDYATEVSNMSRAQI

SEQ ID NO: 1128 - protein, 152 aa, Kosakonia cowanii
TTQTDFNGIKVLNTGTGSSSYSFQVGAKDNETISISLTKSDSYNLYNATGATAATTGQTINGNKRATAAEGFDVLKGTVDASGKTNGAPLADIDAAIKAVDDQRSLLGASQNRFESTITNLNNTVSNLSAARSRIQDSDYATEVSNMSRAQI

SEQ ID NO: 1129 - protein, 172 aa, Kosakonia cowanii
MAVINTNTLSLMTQNNLTKSQSSLGTSIERLSSGLRINSAKDDAAGQAIANRFTSNINGLTVAARNANDGISLAQTAEGALSEINNNLQRIRDLTVQAQNSSNSASDIDSIQAEVNQRMEEVNRVTTQTDFNGIKVLNTGTGSSSYSFQVGAKDNETISISLTKSDSYNLYN

SEQ ID NO: 1130 - protein, 172 aa, Kosakonia cowanii
MAVINTNTLSLMTQNNLTKSQSSLGTSIERLSSGLRINSAKDDAAGQAIANRFTSNINGLGVAARNANDGISLAQTAEGALSEVNNNLQRIRDLTVQAQNSSNSASDIDSIQAEVNQRMEEINRVTTQTDFNGIKVLNTGTGSSSYSFQVGAKDNETISISLTKSDSYNLYN

SEQ ID NO: 1131 - protein, 201 aa, Kosakonia cowanii
MAVINTNTLSLMTQNNLTKSQSSLGTSIERLSSGLRINSAKDDAAGQAIANRFTSNINGLTVAARNANDGISLAQTAEGALSEVNNNLQRIRDLTVQAQNSSNSASDIDSIQAEVNQRMEEINRVTTQTDFNGIKVLNTGTGSSSYSFQVGSKDSETISISLTKSDSYNLYNATGATAQTTGQTINGNKRSTAAEGFDVLK

SEQ ID NO: 1132 - protein, 301 aa, Kosakonia cowanii
MAVINTNTLSLMTQNNLTKSQSSLGTSIERLSSGLRINSAKDDAAGQAIANRFTSNINGLTVAARNANDGISLAQTAEGALSEVNNNLQRIRDLTVQAQNSSNSASDIDSIQAEVNQRMEEINRVTTQTDFNGIKVLNTGTGSSSYNFQVGSKDNETISISLSKSDSYNLYNATGATAVTTSQTINGNARSTSAEGFDVLKGTVDSTGGTNGAPLADIDAAIKAVDDQRSMLGASQNRFESTITNLNNTVSNLSAARSRIQDSDYATEVSNMSRAQILQQAGSSVLAQANQVPQTMLSLLR

SEQ ID NO: 1133 - protein, 210 aa, Kosakonia cowanii
MAWVLLPRNANDGISLSQTAEGALGEINNNLQRIRDLTVQAQNSSNSASDIDSIQAEVNQRMEEVNRVTNQTDFNGIKVLNTGSGTSTYNFQVGAKDGEKIGIDISSSDSYNLAAAGSSGTALNTKAMASGDTVNGTQRQTQAVGFDVLNGKVTGGASGSASGTTPLADIDAAIKSVDSQRSLLGASQNRFESTITNLNNTVSNLSSARS

SEQ ID NO: 1134 - protein, 220 aa, Kosakonia cowanii
MAVINTNTLSLMTQNNLTKSQSSLGTSIERLSSGLRINSAKDDAAGQAIANRFTSNINGLSVAARNANDGISLSQTAEGALGEINNNLQRIRDLTVQAQNSSNSASDIDSIQAEVNQRMEEVNRVTSQTDFNGIKVLNTGSGTSTYNFQVGAKDGEKIGIDISSSDNYNLAAAGSSGTALNTKAMASGDTINGTQRQTQAVGFDVMHGKVTGGASGTASG

SEQ ID NO: 1135 - protein, 301 aa, Kosakonia cowanii
MAVINTNTLSLMTQNNLTKSQSSLGTSIERLSSGLRINSAKDDAAGQAIANRFTSNINGLTVAARNANDGISLAQTAEGALSEVNNNLQRIRDLTVQAQNSSNSASDIDSIQAEVNQRMEEINRVTTQTDFNGIKVLNTGTGSSSYSFQVGSKDSETISISLTKSDSYNLYNATGATAQTTGQTINGNKRSTAAEGFDVLKGTVDASGNTDGSPLADIDKAIKAVDDQRSLLGASQNRFESTITNLNNTVSNLSAARSRIQDSDYATEVSNMSRAQILQQAGSSVLAQANQVPQTMLSLLR

SEQ ID NO: 1136 - protein, 301 aa, Kosakonia cowanii
MAVINTNTLSLMTQNNLTKSQSSLGTSIERLSSGLRINSAKDDAAGQAIANRFTSNINGLTVAARNANDGISLAQTAEGALSEINNNLQRIRDLTVQAQNSSNSASDIDSIQAEVNQRMEEVNRVTTQTDFNGIKVLNTGTGSSSYSFQVGAKDNETISISLTKSDSYNLYNATGATAATTGQTINGNKRATAAEGFDVLKGTVDASGKTNGAPLADIDAAIKAVDDQRSLLGASQNRFESTITNLNNTVSNLSAARSRIQDSDYATEVSNMSRAQIIQQAGTSVLAQANQFPQTNLSLLR

SEQ ID NO: 1137 - protein, 288 aa, Kosakonia cowanii
MAVINTNTLSLMTQNNLTKSQSSLGTSIERLSSGLRINSAKDDAAGQAIANRFTSNINGLTVAARNANDGISLAQTAEGALSEINNNLQRIRDLTVQAQNSSNSASDIDSIQAEVNQRMEEVNRVTTQTDFNGIKVLNTGTGSSSYSFQVGAKDSETISISLTKSDSYNLYNATGATAATTGQTINGNKRSTAAEGFDVLKGTVDASGNTDGSPLADIDKAIKAVDYQRSLLGASQNRFESTITNLDNTVCNLSAARSRLQDSDYATDLSNMCRAQILQLAGSSVLAL

SEQ ID NO: 1138 - protein, 125 aa, Kosakonia cowanii
MAVINTNTLSLMTQNNLTKSQSSLGTSIERLSSGLRINSAKDDAAGQAIANRFTSNINGLGVAARNANDGISLAQTAEGALSEVNNNLQRIRDLTVQAQNSSNSASDIDSIQAEVNQRMEEINRV

SEQ ID NO: 1139 - protein, 223 aa, Kosakonia cowanii
GALSEVNNNLQRIRDLTVQAQNSSNSASDIDSIQAEVNQRMEEINRVTTQTDFNGIKVLNTGTGSSSYSFQVGSKDSETISISLTKSDSYNLYNATGATAQTTGQTINGNKRSTAAEGFDVLKGTVDASGSTDGSPLADIDKAIKAVDDQRSLLGASQNRFESTITNLNTTESNLSAARSRIQDSDYATEVSNMSRAQILQQAGSSVLAQANQVPQTMLSLLR

SEQ ID NO: 1140 - protein, 350 aa, Kosakonia cowanii
MAVINTNTLSLMTQNNLTKSQSSLGTSIERLSSGLRINSAKDDAAGQAIANRFTSNINGLGVAARNANDGISLAQTAEGALSEVNNNLQRIRDLTVQAQNSSNSASDIDSIQAEVNQRMEEINRVAEGALSEVNNNLQRIRDLTVQAQNSSNSASDIDSIQAEVNQRMEEINRVTTQTDFNGIKVLNTGTGSSSYNFQVGSKDNETISISLSKSDSYNLYNATGATAVTTTQTINGNARSTSAEGFDVLKGTVDSTGGTNGAPLADIDAAIKAVDDQRSMLGASQNRFESTITNLNNTVSNLSAARSRIQDSDYATEVSNMSRAQILQQAGSSVLAQANQVPQTMLSLLR

SEQ ID NO: 1141 - protein, 223 aa, Kosakonia cowanii
GALSEVNNNLQRIRDLTVQAQNSSNSASDIDSIQAEVNQRMEEINRVTTQTDFNGIKVLNTGTGSSSYSFQVGAKDNETISISLTKSDSYNLYNATGATAATTGQTINGNKRATAAEGFDVLKGTVDASGKTNGAPLADIDAAIKAVDDQRSLLGASQNRFESTITNLNNTVSNLSAARSRIQDSDYATEVSNMSRAQILQQAGSSVLAQANQVPQTMLSLLR

SEQ ID NO: 1142 - protein, 300 aa, Kosakonia cowanii
MAVINTNTLSLMTQNNLTKSQSSLGTSIERLSSGLRINSAKDDAAGQAIANRFTSNINGLTVAARNANDGISLAQTAEGALSEINNNLQRIRDLTVQAQNSSNSASDIDSIQAEVNQRMEEVNRVTTQTDFNGIKVLNTGTGSSSYSFQVGAKDSETISISLTKSDSYNLYNATGATAATPGQTINGNKRSTAAEGFDVLKGTVDASGNTDGSPLADIDKAIKAVDDQRSLLGASQNRFESTITNLNNTVSNLSAARSRIQDSDYATEVSNMSRAQILQQAGSSVLAQANQVPQTMLSLL

SEQ ID NO: 1143 - protein, 211 aa, Kosakonia cowanii
IRDLTVQAQNSSNSASDIDSIQAEVNQRMEEINRVTTQTDFNGIKVLNTGTGSSSYNFQVGSKDNETISISLSKSDSYNLYNATGATAVTTTQTINGNARSTSAEGFDVLKGTVDSTGGTNGAPLADIDAAIKAVDDQRSMLGASQNRFESTITNLNNTVSNLSAARSRIQDSDYATEVSNMSRAQILQQAGSSVLAQANQVPQTMLSLLR

SEQ ID NO: 1144 - protein, 225 aa, Kosakonia cowanii
MAVINTNTLSLMTQNNLTKSQSSLGTSIERLSSGLRINSAKDDAAGQAIANRFTSNINGLGVAARNANDGISLAQTAEGALSEVNNNLQRIRDLTVQAQNSSNSASDIDSIQAEVNQRMEEINRVTTQTDFNGIKVLNTGTGSSSYSFQVGAKDNETISISLTKSDSYNLYNATGATAATTGQTINGNKRSTAAEGFDVLKGTVDASGKTDGGPLADIDKAIKAV

SEQ ID NO: 1145 - protein, 135 aa, Kosakonia cowanii
IRDLTVQAQNSSNSASDIDSIQAEVNQRMEEINRVTTQTDFNGIKVLNTGTGSSSYSFQVGSKDSETISISLTKSDSYNLYNATGATAQTTGQTINGNKRSTAAEGFDVLKGTVDASGKTDGGPLADIDKAIKAV

SEQ ID NO: 1146 - protein, 123 aa, Kosakonia cowanii
MAVINTNTLSLMTQNNLTKSQSSLGTSIERLSSGLRINSAKDDAAGQAIANRFTSNINGLTVAARNANDGISLAQTAEGALSEVNNNLQRIRDLTVQAQNSSNSASDIDSIQAEVNQRMEEIN

SEQ ID NO: 1147 - protein, 311 aa, Kosakonia cowanii
MAVINTNTLSLVTQNNLTKSQSSLGTAIERLSSGLRINSAKDDAAGEAIANRFTSNINGMTVAARNANDGISLSQTAEGALTEINNNLQRVRDLTVQAQNSSNSASDVDSIQAEVNQRMQEIDRVTKQTDFNGIKVLNTGSGSTTYNFQVGAKDGETIGIALSSSDGFDLAAAGNASTGTTQNTSSTTGQTVNGNARTTSAIGFDVLKGAVTGGSGGTASGTTPLADIDKAIKAVDNQGSLLGASQNRFESTISNLNNTVTNLTAARSRIQDADYATEVSNMSRAQILQQAGSSVLAQANQVPQTMLSLLR

SEQ ID NO: 1148 - protein, 156 aa, Kosakonia cowanii
MNNNLQRIRDLTVQAQNSSNSASDIDSIQAEVNQRMEEINRVTTQTDFNGIKVLNTGTGSSSYSFQVGSKDSETISISLTKSDSYNLYNATGATAQTTGQTINGNKRSTAAEGFDVLKGTVDASGSTDGSPLADIDKAIKAVDDQRSLLGASQNRF

SEQ ID NO: 1149 - protein, 149 aa, Kosakonia cowanii
MEEVNRVTNQTDFNGIKVLNTGSGTSTYNFQVGSKDGEKIGIDISSSDSYNLAAAGSSGTALNTKAMASGDTVNGTQRQTQAVGFDVLNGKVTGGASGSASGTTPLADIDAAIKSVDSQRSLLGASQNRFESTITNLNNTVSNLSSARS

SEQ ID NO: 1150 - protein, 133 aa, Kosakonia cowanii
DFNGIKVLNTGSGTSTYNFQVGAKDGEKIGIDISSSDSYNLAAACSSGTALNTKAMASGDTVNGTQRQTQAVGFDVLNGKVNGGARGSASGTTPLADIDAAIKSVDSQRSLLGASQNRFESTITNLNNTVSNL

SEQ ID NO: 1151 - protein, 96 aa, Kosakonia cowanii
MAVINTNTLSLMTQNNLTKSQSSLGTSIERLSSGLRINSAKDDAAGQAIANRFTSNINGLSVAARNANDGISLSQTAEGALGEINNNLQRIRDLTV

SEQ ID NO: 1152 - protein, 185 aa, Kosakonia cowanii
MEEVNRVTNQTDFNGIKVLNTGSGTSTYNFQVGSKDGEKIGIDISSSDSYNLAAAGSSGTALNTKAMASGDTVNGTQRQTQAVGFDVLKGKVTGGASGSASGTTPLADIDAAIKSVDSQRSLLGASQNRFESTITNLNNTVSNLSSARSRIQDSDYATEVSNMSRAQILQQAGSSVLAQANQVPQ

SEQ ID NO: 1153 - protein, 172 aa, Kosakonia cowanii
MNASSGWNLSAASAPGTGNANVASGDRKVEVSGFDVLTASGAGAAGTTGALSTIDDAIKAVDTQRSMLGASQNRFESTITNLNNTVNNLSAARSRIQDSDYATEVSNMSPRADPAAGWFFCTGSGQPGSADHAVPAALIAEYVLQKAPLVGAFFIVTPKPPPGELVIDPVRL

SEQ ID NO: 1154 - protein, 88 aa, Kosakonia cowanii
MAVINTNTLSLMTQNNLNKSQSSLGTSIERLSSGLRINSAKDDAAGQAIANRFTSNINGLSVAARNANDGISLAQTAEGALSEINNNL

SEQ ID NO: 1155 - protein, 228 aa, Kosakonia cowanii
RVRDLTVQAQNSSNSASDIDSIQAEVNQRLSEIDRVTKQTDFNGTKILNNTAAKTFDFQVGAKDGETIGITMNASSGWNLSGAAAAGAGNSNVAAADRKVQVSGFDVLKATVTGAGAPTTGALSTIDDAIKAVDTQRSMLGASQNRFESTITNLNNTVNNLSAARSRIQDSDYATEVSNMSPRADPAAGWFFCTGSGQPGSADHAVPAALIAEYVLQKAPLVGAFFIV

SEQ ID NO: 1156 - protein, 301 aa, Kosakonia cowanii
MAVINTNTLSLMTQNNLTKSQSSLGTSIERLSSGLRINSAKDDAAGQAIANRFTSNINGLTVAARNANDGISLAQTAEGALSEINNNLQRIRDLTVQAQNSSNSASDIDSIQAEVNQRMEEVNRVTTQTDFNGIKVLNTGTGSSSYSFQVGAKDNETISISLTKSDSYNLYNATGATAATTGQTINGNKRATAAEGFDVLKGTVDASGKTNGAPLADIDAAIKAVDDQRSLLGASQNRFESTITNLNNTVSNLSAARSRIQDSDYATEVSNMSRAQILQQAGSSVLAQANQVPQTMLSLLR

SEQ ID NO: 1157 - protein, 287 aa, Kosakonia cowanii
MAVINTNTLSLMTQNNLTKSQSSLGTSIERLSSGLRINSAKDDAAGQAIANRFTSNINGLTVAARNANDGISLAQTAEGALSEINNNLQRIRDLTVQAQNSSNSASDIDSIQAEVNQRMEEVNRVTTQTDFNGIKVLNTGTGSSSYSFQVGAKDSETISISLTKSDSYNLYNATGATAATTGQTINGNKRSTAAEGFDVLKGTVDASGNTDGSPLADIDKAIKAVDDQRSLLGASQNRFESTITNLNNTVSNLSAARSRIQDSDYATEVSNMSRAQILQQAGSSVLA

SEQ ID NO: 1158 - protein, 240 aa, Kosakonia cowanii
VAARNANDGISLAQTAEGALSEVNNNLQRIRDLTVQAQNSSNSASDIDSIQAEVNQRMEEINRVTTQTDFNGIKVLNTGTGSSSYSFQVGAKDNETISISLTKSDSYNLYNATGATAATTGQTINGNKRSTAAEGFDVLKGTVDASGKTDGGPLADIDAAIKAVDDQRSLLGASQNRFESTITNLNNTVSNLSAARSRIQDSDYATEVSNMSRAQILQQAGSSVLAQANQVPQTMLSLLR

SEQ ID NO: 1159 - protein, 280 aa, Kosakonia cowanii
MAVINTNTLSLMTQNNLTKSQSSLGTSIERLSSGLRINSAKDDAAGQAIANRFTSNINGLTVAARNANDGISLAQTAEGALSEINNNLQRIRDLTVQAQNSSNSASDIDSIQAEVNQRMEEVNRVTTQTDFNGIKVLNTGTGSSSYSFQVGAKDSETISISLTKSDSYNLYNATGATAATTGQTINGNKRSTAAEGFDVLKGTVDASGNTNGSPLADIDSAIKAVDDQRSLLGASQNRFESTITNLNNTVSNLSAARSRIQDSDYATEVSNMSRAQILQQ

SEQ ID NO: 1160 - protein, 134 aa, Kosakonia cowanii
MTTQTDFNGIKVLNTGTGSSSYSFQVGSKDNETISISLTKSDSYNLYNATGATAATTGQTINGNKRSTAAEGFDVLKGTVNASGNTDGSPLADIDAAIKAVDDQRSMLGASQNRFESTITNLNNTVSNLSAARS

SEQ ID NO: 1161 - protein, 186 aa, Kosakonia cowanii
LAQTAEGALSEVNNNLQRIRDLTVQAQNSSNSASDIDSIQAEVNQRMEEINRVTTQTDFNGIKVLNTGTGSSSYNFQVGSKDSETISISLSKSDSYNLYNATGATASTTGQTINGNKRTTSAEGFDVLKGTVDSTGGTNGSPLADIDAAIKAVDDQRSMLGASQNRFESTITNLNNTVSNLSAARS

SEQ ID NO: 1162 - protein, 302 aa, Kosakonia cowanii
MAVINTNTLSLINQNNLGKSQAAQSSAIQRLSSGLRINSAKDDAAGQAIANRFSSSINGMGVAARNANDAISLAQTAEGALSEINNNLQRIRDLAVQAQNSTNSASDVDSIQSEVNERMAEINRVTLQTDFNGIKILNTSSGASSYGFHVGADDGEEIVIRISSSDDYNLGANSGSIGEVSGEFIHGNARSVRAIGFDVLHGTVTPFSGAILNNPLAAIDDAIKAVDTQRSSLGAFQNRFESVINNLNQAATNLSAARSRINDADYGTEVSNMSRAQILQQAGSSVLAQANQVPQTMLSLLR

SEQ ID NO: 1163 - protein, 416 aa, Kosakonia cowanii
MSQVINTNALSLVAQNNLNKSQDSLGTAIERLSSGLRINSAKDDAAGQAISNRFTANINGLTQASRNANDGISIAQTTEGALNEINDNLQNIRRLSVQAQNGTNSDSDRQSIQDEIDARLDEINRISEQTEFNGVKVLSKDQKLSIQVGSNDGQTIDIELNQMDSSTLGMDGFTVANGVDPTTLTASTGTVKVDSGFDYDVANFTDSAGTATAVDDIVVDDNGDVYAQVGAKLHKVTEDPTTGEISFNSGTDDTASVVGTPTSVAGQSMMKDQAVDMTGITGTLMEDGQGNYYVDDGAGNLTEAKIDTTTWKAEDTGKAVSTTPATTDPLTKIDEALAQVDEMRSGLGAVQNRFASVISNLNNTVNNLSESRSRILDADFASEVSEMSRANILQSAGTTVLAQANQVPQNVLSLLR

SEQ ID NO: 1164 - protein, 307 aa, Kosakonia cowanii
MRLSTSYIFQNRIDSLGDAMTGYNDLATRLSAGQTLLKPSDDPTGASQSVTLQTALSRMSQFDTARTYAQDALGQEDNTLDSISNLLTENLTQKVIAGGNGAYSDEDRAALAEELQGIRDNLLDLANTKNSDGRYIFAGYKTGNAPFQADGTYVGGDTAMTQVVSDSTEMQVGHTGSDVFMSGTPDDLFKALDSAIAQLKQPVTSDADRDALQAVLDDANVSIKKNIDNLGKVRATVGTNMQQIEALGFSAEAQSINVQSRLQETLGSDWDSMITLLSQSKMSEFALNSSMTVFQSMQQLSIFKVMG

SEQ ID NO: 1165 - protein, 301 aa, Kosakonia cowanii
MAVINTNTLSLMTQNNLTKSQSSLGTSIERLSSGLRINSAKDDAAGQAIANRFTSNINGLTVAARNANDGISLAQTAEGALSEVNNNLQRIRDLTVQAQNSSNSASDIDSIQAEVNQRMEEINRVTTQTDFNGIKVLNTGTGSSSYNFQVGSKDSETISISLSKSDSYNLYNATGATASTTGQTINGNKRTTSAEGFDVLKGTVDSTGGTNGSPLADIDAAIKAVDDQRSMLGASQNRFESTITNLNNTVSNLSAARSRIQDSDYATEVSNMSRAQILQQAGSSVLAQANQVPQTMLSLLR

SEQ ID NO: 1166 - protein, 203 aa, Kosakonia cowanii
QNSSNSASDIDSIQAEVNQRMEEINRVTTQTDFNGIKVLNTGTGSSSYSFQVGAKDNETISISLTKSDSYNLYNATGATAATTGQTINGNKRSTAAEGFDVLKGTVDASGKTDGGPLADIDAAIKAVDDQRSLLGASQNRFESTITNLNNTVSNLSAARSRIQDSDYATEVSNMSRAQILQQAGSSVLAQANQVPQTMLSLLR

SEQ ID NO: 1167 - protein, 301 aa, Kosakonia cowanii
MAVINTNTLSLMTQNNLTKSQSSLGTSIERLSSGLRINSAKDDAAGQAIANRFTSNINGLTVAARNANDGISLAQTAEGALSEINNNLQRIRDLTVQAQNSSNSASDIDSIQAEVNQRMEEVNRVTTQTDFNGIKVLNTGTGSSSYSFQVGAKDSETISISLTKSDSYNLYNATGATAATTGQTINGNKRSTAAEGFDVLKGTVDASGNTNGSPLADIDSAIKAVDDQRSLLGASQNRFESTITNLNNTVSNLSAARSRIQDSDYATEVSNMSRAQILQQAGSSVLAQANQVPQTMLSLLR

SEQ ID NO: 1168 - protein, 301 aa, Kosakonia cowanii
MAVINTNTLSLMTQNNLTKSQSSLGTSIERLSSGLRINSAKDDAAGQAIANRFTSNINGLGVAARNANDGISLAQTAEGALSEVNNNLQRIRDLTVQAQNSSNSASDIDSIQAEVNQRMEEINRVTTQTDFNGIKVLNTGTGSSSYSFQVGSKDNETISISLTKSDSYNLYNATGATAATTGQTINGNKRSTAAEGFDVLKGTVNASGNTDGSPLADIDAAIKAVDDQRSLLGASQNRFESTITNLNNTVSNLSAARSRIQDSDYATEVSNMSRAQILQQAGSSVLAQANQVPQTMLSLLR

SEQ ID NO: 1169 - protein, 307 aa, Kosakonia cowanii
MRLSTSYIFQNRIDSLGDAMTGYNDLATRLSAGQTLLKPSDDPTGASQSVTLQTALSRMSQFDTARTYAQDALGQEDNTLDSIGNLLTENLTQKVIAGGNGAYSDEDRAALAEELQGIRDNLLDLANTKNSDGRYIFAGYKTGSAPFQADGSYVGGDTAMTQVVSDSTEMQVGHTGSEVFLSGTPDDLFQALDSAIAQLKQPVTSDADRDALQGVLDDANISIKKNIDNLGKVRATVGTNMQQIESLGFSAESQSINVQSRLQETLGSDWDSMITLLSQSKMSEFALNSSMTVFQSMQQLSIFKVMG

SEQ ID NO: 1170 - protein, 125 aa, Kosakonia cowanii
MAVINTNTLSLMTQNNLTKSQSSLGTAIERLSSGLRINSAKDDAAGQAIANRFTSNINGLGVAARNANDGISLSQTAEGALGEINNNLQRIRDLTVQAQNSSNSASDIDSIQAEVNQRMEEVNRV

SEQ ID NO: 1171 - protein, 303 aa, Kosakonia cowanii
MAVINTNTLSLTTQNNLTKSQSSLGTAIERLSSGLRINSAKDDAAGQAIANRFTSNINGLGVAARNANDGISLSQTAEGALGEINNNLQRIRDLTVQAQNSSNSASDIDSIQAEVNQRMEEVNRVTNQTDFNGIKVLNTGSGTSTYNFQVGAKDGEKIGIDISSSDSYNLAAAGSSGTALNTKAMASGDTVNGTQRQTQAVGFDVLKGKVTGGASGTASGSTPLADIDAAIKSVDSQRSLLGASQNRFESTITNLNNTVSNLSSARSRIQDSDYATEVSNMSRAQILQQAGSSVLAQANQVPQ

SEQ ID NO: 1172 - protein, 329 aa, Kosakonia cowanii
MAVINTNTLSLMTQNNLTKSQSSLGTSIERLSSGLRINSAKDDAAGQAIANRFTSNINGLSVAARNANDGISLSQTAEGALGEINNNLQRIRDLTVQAQNSSNSASDIDSIQAEVNQRMEEVNRVTNQTDFNGIKVLNTGSGTSTYNFQVGSKDGEKIGIDISSSDSYNLAAAGSSGTALNTKAMASGDTVNGTQRQTQAVGFDVLNGKVTGGASGSASGTTPLADIDAAIKSVDSQRSLLGASQNRFESTITNLNNTVSNLSSAPQPYSGLRLCDRSVEHVPRADPAAGWFFRAGAGQPGSADHAVPAALITQCLIKPGLAGFFFAIF

SEQ ID NO: 1173 - protein, 421 aa, Kosakonia cowanii
MSQVINTNALSLVAQNNLNKSQDSLGTAIERLSSGLRINSAKDDAAGQAISNRFTANINGLTQASRNANDGISIAQTTEGALNEINDNLQNIRRLSVQAQNGTNSDSDRQSIQDEIDARLDEINRISEQTEFNGVKVLSKDQKLSIQVGSNDGQTIDIELNQMDSSTLGMSDFTVANGIDKTTLTASSGTVKVDSGFDYDTSNFTDTSSGTAVTSIDDIVVDDSGAVFAKKGSELYAVTEDPTTGEISFDSSVDASGSVTGSTTSVNGENMMKDQAVDMTAITAAGGTLLEDGEGNYYVDDGAGNLTEATIDTTTWTATDTGKAVSTTQATTDPLTKIDEALAQVDEMRSGLGAVQNRFASVISNLNNTVNNLSESRSRILDADFASEVSEMSRANILQSAGTTVLAQANQVPQNVLSLLG

SEQ ID NO: 1174 - protein, 86 aa, Kosakonia cowanii
ADIDAAIKSVDSQRSLLGASQNRFESTITNLNNTVSNLSSARSRIQDSDYATEVSNMSRAQILQQAGSSVLAQANQVPQTMLSLLR

SEQ ID NO: 1175 - protein, 261 aa, Kosakonia cowanii
MAVINTNTLSLMTQNNLTKSQSSLGTAIERLSSGLRINSAKDDAAGQAIANRFTSNINGLSVAARNANDGISLAQTAEGALGEINNNLQRIRDLTVQAQNSSNSASDVDSIQAEVNQRMEEINRVTTQTDFNGIKVLNTGTGTSSYSFQVGAKDNETISISLSSSNAYNLYNATGATAQTTGQTINGNARTTAAEGFDVLKGTVSSGGATDGSPLADIDAAIKSVDSQRSLLGASQNRFESTITNLNNTVSNLSSARSRIQ

SEQ ID NO: 1176 - protein, 419 aa, Kosakonia cowanii
MSQVINTNALSLVAQNNLNKSQGSLGTAIQRLSSGLRINSAKDDAAGQAISNRFTANINGLSQASRNANDGISIAQTTEGALNEINDNLQNIRRLSVQAQNGTNSDSDRQSIQDEIDARLDEINRISEQTEFNGVKVLSKDQSLSIQVGSNDGQTIDIELSKMDSSTLSMDGFTVANGIDPNTLTASTGTVKVDSGFDYDATKFTDGATTGTPLTSIDDIVVDDNGDVFAVKGAEMYAVTEDPTTGEISFNSDNDVATSVVGTPTSVVGEDMMKDQAINMTGITGTLMEDGKGNYYVDDGAGNLTEATIDTTTWAATDTGKAVSTTPATSDPLTKIDEALAQVDEMRSGLGAVQNRFASVISNLNNTVNNLSESRSRILDADFASEVSEMSRANILQSAGTTVLAQANQVPQNVLSLLR

SEQ ID NO: 1177 - protein, 156 aa, Kosakonia cowanii
SNSASDIDSIQAEVNQRMEEVNRVTTQTDFNGIKVLNTGTGSSSYSFQVGAKDNETISISLSSSNSYNLYNATGATAQTTGQTINGNARATAAEGFDVLQGTVSSGGATNGSPLADIDAAIKSVDSQRSLLGASQNRFESTITNLNNTVSNLSSAR

SEQ ID NO: 1178 - protein, 307 aa, Kosakonia cowanii
MRLSTSYIFQNRIDSLGDAMTGYNDLATRLSAGQTLLKPSDDPTGASQSVTLQTALSRMSQFDTARTYAQDALGQEDNTLDSIGNLLTENLTQKVIAGGNGAYSDEDRAALAEELQGIRDNLLDLANTKNSDGRYIFAGYKTGSAPFQADGTYVGGDTAMTQVVSDSTEMQVGHTGDDVFLSGTPDDLFKALDNAIAQLKQPITSDADRDALQAVLDDSNVSIKKNIDNLGKVRATVGTNMQQIESLGFSAEAQSINVQSRLQETLGSDWDSMITLLSQSKMSEFALNSSMTVFQSMQQLSIFKVMG

SEQ ID NO: 1179 - protein, 301 aa, Kosakonia cowanii
MAVINTNTLSLTTQNNLTKSQSSLGTAIERLSSGLRINSAKDDAAGQAIANRFTSNINGLGVAARNANDGISLAQTAEGALGEINNNLQRIRDLTVQAQNSSNSASDIDSIQAEVNQRMEEVNRVTTQTDFNGIKVLNTGTGSSSYDFQVGSKDNEKISISLSSSNSYNLYNATGATAQTTGQTINGNARATAAEGFDVLQGTVSSGGTTDGSPLADIDAAIKSVDSQRSLLGASQNRFESTITNLNNTVSNLSSARSRIQDSDYATEVSNMSRAQILQQAGSSVLAQANQVPQTMLSLLR

SEQ ID NO: 1180 - protein, 302 aa, Kosakonia cowanii
MAVINTNTLSLINQNNLNKSQAAQSSAIQRLSSGLRINSAKDDAAGQAIANRFSSSINGMGVAARNANDAISLAQTAEGALSEINNNLQRIRDLAVQAQNSTNSASDVDSIQSEVNERMAEINRVTRQTDFNGIKILDSGSGSFGYGFQVGADDGEEIVLTIGGSDDYNLGANSGSIGEVSGEFIHGNARSVKAMGFDVLHGTVTPYSGAILNNPLAAIDDAIKAVDTQRSSLGAFQNRFESTINNLNQAATSLSAARSRINDADYGTEVSNMSRAQILQQAGSSVLAQANQVPQTMLSLLR

SEQ ID NO: 1181 - protein, 286 aa, Kosakonia cowanii
MAVINTNTLSLMTQNNLTKSQSSLGTSIERLSSGLRINSAKDDAAGQAIANRFTSNINGLTVAARNANDGISLAQTAEGALSEINNNLQRIRDLTVQAQNSSNSASDIDSIQAEVNQRMEEVNRVTTQTDFNGIKVLNTGTGSSSYSFQVGAKDSETISISLTKSDSYNLYNATGATAATTGQTINGNKRSTAAEGFDVLKGTVDASGNTDGSPLADIDKAIKAVDDQRSLLGASQNRFESTITNLNNTVSNLSAARSRIQDSDYATEVSNMSRAQILQQAGSSVL

SEQ ID NO: 1182 - protein, 301 aa, Kosakonia cowanii
MAVINTNTLSLMTQNNLTKSQSSLGTSIERLSSGLRINSAKDDAAGQAIANRFTSNINGLGVAARNANDGISLAQTAEGALSEVNNNLQRIRDLTVQAQNSSNSASDIDSIQAEVNQRMEEINRVTTQTDFNGIKVLNTGTGSSSYSFQVGAKDNETISISLTKSDSYNLYNATGATAATTGQTINGNKRATAAEGFDVLKGTVDASGKTNGAPLADIDAAIKAVDDQRSLLGASQNRFESTITNLNNTVSNLSAARSRIQDSDYATEVSNMSRAQILQQAGSSVLAQANQVPQTMLSLLR

SEQ ID NO: 1183 - protein, 146 aa, Kosakonia cowanii
MAVINTNTLSLMTQNNLTKSQSSLGTSIERLSSGLRINSAKDDAAGQAIANRFTSNINGLTVAARNANDGISLAQTAEGALSEVNNNLQRIRDLTVQAQNSSSSASDIDSIQAEVNQRMEEINRVTTQTDFNGIKVLNTGTGSSSY

SEQ ID NO: 1184 - protein, 183 aa, Kosakonia cowanii
MEEINRVTTQTDFNGIKVLNTGTGSSSYSFQVGSKDSETISISLTKSDSYNLYNATGATAQTTGQTINGNKRSTAAEGFDVLKGTVDASGSTDGSPLADIDKAIKAVDDQRSLLGASQNRFESTITNLNNTVSNLSAARSRIQDSDYATEVSNMSRAQILQQAGSSVLAQANQVPQTMLSLLR

SEQ ID NO: 1185 - protein, 145 aa, Kosakonia cowanii
MAVINTNTLSLMTQNNLTKSQSSLGTSIERLSSGLRINSAKDDAAGQAIANRFTSNINGLTVAARNANDGISLAQTAEGALSEVNNNLQRIRDLTVQAQNSSNSASDIDSIQAEVNQRMEEINRVTTQTDFNGIKVLNTGTGSSS

SEQ ID NO: 1186 - protein, 168 aa, Kosakonia cowanii
MEEINRVTTQTDFNGIKVLNTGTGSSSYNFQVGSKDNETISISLSKSDSYNLYNATGATAVTTTQTINGNARSTSAEGFDVLKGTVDSTGGTNGAPLADIDAAIKAVDDQRSMLGASQNRFESTITNLNNTVSNLSAARSRIQDSDYATEVSNMSRAQILQQAGSSVL

SEQ ID NO: 1187 - protein, 225 aa, Kosakonia cowanii
MAVINTNTLSLMTQNNLTKSQSSLGTSIERLSSGLRINSAKDDAAGQAIANRFTSNINGLTVAARNANDGISLAQTAEGALSEINNNLQRIRDLTVQAQNSSNSASDIDSIQAEVNQRMEEVNRVTTQTDFNGIKVLNTGTGSSSYSFQVGAKDSETISISLTKSDSYNLYNATGATAATTGQTINGNKRSTAAEGFDVLKGTVDASGNTDGSPLADIDKAIKAV

SEQ ID NO: 1188 - protein, 147 aa, Kosakonia cowanii
GALSEVNNNLQRIRDLTVQAQNSSNSASDIDSIQAEVNQRMEEINRVTTQTDFNGIKVLNTGTGSSSYSFQVGSKDSETISISLTKSDSYNLYNATGATAQTTGQTINGNKRSTAAEGFDVLKGTVDASGNTDGSPLADIDKAIKAV

SEQ ID NO: 1189 - protein, 166 aa, Kosakonia cowanii
MLNTGTGSSSYSFQVGAKDNETISISLTKSDSYNLYNATGATAATTGQTINGNKRATAAEGFDVLKGTVDASGKTNGAPLADIDAAIKAVDDQRSLLGASQNRFESTITNLNNTVSNLSAARSRIQDSDYATEVSNMSRAQILQQAGSSVLAQANQVPQTMLSLLR

SEQ ID NO: 1190 - protein, 261 aa, Kosakonia cowanii
MAVINTNTLSLMTQNNLTKSQSSLGTSIERLSSGLRINSAKDDAAGQAIANRFTSNINGLTVAARNANDGISLAQTAEGALSEVNNNLQRIRDLTVQAQNSSNSASDIDSIQAEVNQRMEEINRVTTQTDFNGIKVLNTGTGSSSYSFQVGSKDSETISISLTKSDSYNLYNATGATAQTTGQTINGNKRSTAAEGFDVLKGTVDASGSTDGSPLADIDKAIKAVDDQRSLLGASQNRFESTITNLNNTVSNLSAARSRIQ

SEQ ID NO: 1191 - protein, 261 aa, Kosakonia cowanii
MAVINTNTLSLMTQNNLTKSQSSLGTSIERLSSGLRINSAKDDAAGQAIANRFTSNINGLGVAARNANDGISLAQTAEGALSEVNNNLQRIRDLTVQAQNSSNSASDIDSIQAEVNQRMEEINRVTTQTDFNGIKVLNTGTGSSSYSFQVGAKDNETISISLTKSDSYNLYNATGATAATTGQTINGNKRATAAEGFDVLKGTVDASGKTNGAPLADIDAAIKAVDDQRSLLGASQNRFESTITNLNNTVSNLSAARSRIQ

SEQ ID NO: 1192 - protein, 239 aa, Kosakonia cowanii
MAVINTNTLSLMTQNNLTKSQSSLGTSIERLSSGLRINSAKDDAAGQAIANRFTSNINGLTVAARNANDGISLAQTAEGALSEINNNLQRIRDLTVQAQNSSNSASDIDSIQAEVNQRMEEVNRVTTQTDFNGIKVLNTGTGSSSYSFQVGAKDSETISISLTKSDSYNLYNATGATAATTGQTINGNKRSTAAEGFDVLKGTVDASGNTDGSPLADIDKAIKAVDDQRSLLGASQNRF

SEQ ID NO: 1193 - protein, 247 aa, Kosakonia cowanii
MAVINTNTLSLMTQNNLTKSQSSLGTSIERLSSGLRINSAKDDAAGQAIANRFTSNINGLTVAARNANDGISLAQTAEGALSEVNNNLQRIRDLTVQAQNSSNSASDIDSIQAEVNQRMEEINRVTTQTDFNGIKVLNTGTGSSSYSFQVGSKDSETISISLTKSDSYNLYNATGATAQTTGQTINGNKRSTAAEGFDVLKGTVDASGSTDGSPLADIDKAIKAVDDQRSLLGASQNRFESTITNLN

SEQ ID NO: 1194 - protein, 156 aa, Kosakonia cowanii
MAVINTNTLSLMTQNNLTKSQSSLGTSIERLSSGLRINSAKDDAAGQAIANRFTSNINGLGVAARNANDGISLAQTAEGALSEVNNNLQRIRDLTVQAQNSSNSASDIDSIQAEVNQRMEEINRVTTQTDFNGIKVLNTGTGSSSYSFQVGAKDNE

SEQ ID NO: 1195 - protein, 247 aa, Kosakonia cowanii
MAVINTNTLSLMTQNNLTKSQSSLGTSIERLSSGLRINSAKDDAAGQAIANRFTSNINGLTVAARNANDGISLAQTAEGALSEINNNLQRIRDLTVQAQNSSNSASDIDSIQAEVNQRMEEVNRVTTQTDFNGIKVLNTGTGSSSYSFQVGAKDSETISISLTKSDSYNLYNATGATAATTGQTINGNKRSTAAEGFDVLKGTVDASGNTDGSPLADIDKAIKAVDDQRSLLGASQNRFESTITNLN

SEQ ID NO: 1196 - protein, 83 aa, Kosakonia cowanii
SPLADIDKAIKAVDDQRSLLGASQNRFESTITNLNNTVSNLSAARSRIQDSDYATEVSNMSRAQILQQAGSSVLAQANQVPQT

SEQ ID NO: 1197 - protein, 83 aa, Kosakonia cowanii
DKAIKAVDDQRSLLGASQNLFESTITNLNNTVINLSAALSRIQDSDYATELSNMSRAQILQQAVSSVLAQANQVPQTMLSLLR

SEQ ID NO: 1198 - protein, 302 aa, Kosakonia cowanii
MAVINTNTLSLINQNNLNKSQAAQSSAIQRLSSGLRINSAKDDAAGQAIANRFSSSINGMGVAARNANDAISLAQTAEGALSEINNNLQRIRDLAVQAQNSTNSASDIDSIQSEVNERMAEINRVTRQTDFNGIKILDSGSGSFGYGFQVGADDGEEIVLTIGGSDDYNLGANSGSIGEVSGESIHGSARSVKAMGFDVLHGTVTPFSGAILNNPLAAIDDAIKAVDTQRSSLGAFQNRFESTINNLNQAANSLSAARSRINDADYGTEVSNMSRAQILQQAGSSVLAQANQVPQTMLSLLR

SEQ ID NO: 1199 - protein, 263 aa, Kosakonia cowanii
MAVINTNTLSLMTQNNLTKSQSSLGTAIERLSSGLRINSAKDDAAGQAIANRFTSNINGLSVAARNANDGISLAQTAEGALGEINNNLQRIRDLTVQAQNSSNSASDVDSIQAEVNQRMEEINRVTTQTDFNGIKVLNTGTGTSSYSFQVGAKDNETISISLSSSNAYNLYNATGATAQTTGQTINGNARSTAAEGFDVLQGTVSSGGVTNGSPLADIDAAIKSVDSQRSLLGASQNRFESTITNLNNTVSNLSSARSRIQDS

SEQ ID NO: 1200 - protein, 135 aa, Kosakonia cowanii
TTQNNLTKSQSSLGTAIERLSSGLRINSAKDDAAGQAIANRFTSNINGLGVAARNANDGISLAQTAEGALGEINNNLQRIRDLTVQAQNSSNSASDIDSIQAEVNQRMEEVNRVTTQTDFNGIKVLNTGTGSSSY

SEQ ID NO: 1201 - protein, 124 aa, Kosakonia cowanii
NSSNSASDIDSIQAEVNQRMEEVNRVTTQTDFNGIKVLNTGTGSSSYSFQVGAKDNETISISLSSSNSYNLYNATGATAQTTGQTINGNARSTAAEGFDVLQGTVSSGGATNGSPLADIDAAIK

SEQ ID NO: 1202 - protein, 135 aa, Kosakonia cowanii
TDFNGIKVLNTGTGSSSYDFQVGSKDNEKISISLSSSNSYNLYNATGATAQTTGQTINGNARATAAEGFDVLQGTVSSGGATDGSPLADIDAAIKSVDSQRSLLGASQNRFESTITNLNNTVSNLSSARSRIQDS

SEQ ID NO: 1203 - protein, 307 aa, Kosakonia cowanii
MRLSTSYIFQNRIDSLGDAMTGYNDLATRLSAGQTLLKPSDDPTGASQSVTLQTALSRMSQYDTARTYAQDALGQEDNTLDSIGNLLTENLTQKVIAGGNGAYSDEDRAALAEELQGIRDNLLDLANTKNSDGRYIFAGYKTGSAPFQADGTYVGGDTAMTQVVSDSTEMQVGHTGDDVFLSGTPDDLFKALDNAIAQLKQPITSDADRDALQAVLDDSNVSIKKNIDNLGKVRATVGTNMQQIESLGFSAEAQSINVQSRLQETLGSDWDSMITLLSQSKMSEFALNSSMTVFQSMQQLSIFKVMG

SEQ ID NO: 1204 - protein, 414 aa, Kosakonia cowanii
MSQVINTNALSLVAQNNLNKSQDSLGTAIERLSSGLRINSAKDDAAGQAISNRFTANINGLTQASRNANDGISIAQTTEGALNEINDNLQNIRRLSVQAQNGTNSDSDRQSIQDEIDARLDEINRISEQTEFNGVKVLSKDQKLSIQVGSNDGQTIDIELNQMDASTLGMDGFTVASGVDATKLTTTTDINVKVAVADDLSNVTDSAGGTVAAEEVVTGSDGKTYVVGDDGNYYEAKANAAGDGIEFDTGTVATTTGVTMSSDKSGSSVSVTQTADLGSLTEDLVTDGEGNFYLQDANGSVYEATADATGAVTKGERLSTAAATDDPLTKIDDALAQVDEMRSGLGAVQNRFASVISNLNNTVNNLSESRSRILDADFASEVSEMSRANILQSAGTTVLAQANQVPQNVLSLLG

SEQ ID NO: 1205 - protein, 123 aa, Kosakonia cowanii
MTTQTDFNGIKVLNTGTGTSSYSFQVGAKDNETISIGLSSSNAYNLYNATGATAQTTGQTINGNARATAAEGFDVLKGTVSSGGATDGSPLADIDAAIKSVDSQRSLLGASQNRFESTITNLN

SEQ ID NO: 1206 - protein, 92 aa, Kosakonia cowanii
TDGSPLADIDAAIKSVDSQRSLLGASQNRFESTITNLNNTVSNLSSARSRIQDSDYATEVSNMSRAQILQQAGSSVLAQANQVPQTMLSLLR

SEQ ID NO: 1207 - protein, 151 aa, Kosakonia cowanii
MAVINTNTLSLTTQNNLTKSQSSLGTAIERLSSGLRINSAKDDAAGQAIANRFTSNINGLGVAARNANDGISLAQTAEGALGEINNNLQRIRDLTVQAQNSSNSASDIDSIQAEVNQRMEEVNRVTTQTDFNGIKVLNTGTGSSSYDFQVG

SEQ ID NO: 1208 - protein, 416 aa, Kosakonia cowanii
MSQVINTNALSLVAQNNLNKSQDSLGTAIERLSSGLRINSAKDDAAGQAISNRFTANINGLTQASRNANDGISIAQTTEGALNEINDNLQNIRRLSVQAQNGTNSDSDRQSIQDEIDARLDEINRISEQTEFNGVKVLSKDQKLSIQVGSNDGQTIDIELNQMDSSTLGMDGFSVANGIDPTTLTASTGTVKVDSGFDYDVANFTDTAGTATAVDDIVVDDNGDVYAQVGAEMYAVTEDPTTGEISFDSGTDVSGSVVGTPTSVAGEDMMKDQTVDMTGITGTLMEDGQGNYYVDDGAGNLTEATIDTTTWAATDTGKAVSTTPATSDPLTKIDEALAQVDEMRSGLGAVQNRFASVISNLNNTVNNLSESRSRILDADFASEVSEMSRANILQSAGTTVLAQANQVPQNVLSLLG

SEQ ID NO: 1209 - protein, 307 aa, Kosakonia cowanii
MRLSTSYIFQNRIDSLGDAMTGYNDLATRLSAGQTLLKPSDDPTGASQSVTLQTALSRMSQFDTARTYAQDALGQEDNTLDSIGNLLTENLTQKVIAGGNGAYSDEDRAALAEELQGIRDNLLDLANTKNSDGRYIFAGYKTGNAPFQADGSYVGGDTAMTQVVSDSTEMQVGHTGSEVFLSGTPDDLFQALDSAIAQLKQPVTSDADRDALQGVLDDANISIKKNIDNLGKVRATVGTNMQQIESLGFSAESQSINVQSRLQETLGSDWDSMITLLSQSKMSEFALNSSMTVFQSMQQLSIFKVMG

SEQ ID NO: 1210 - protein, 119 aa, Kosakonia cowanii
MAVINTNTLSLTTQNNLTKSQSSLGTAIERLSSGLRINSAKDDAAGQAIANRFTSNINGLGVAARNANDGISLAQTAEGALGEINNNLQRIRDLTVQAQNSSNSASDIDSIQAEVNQRM

SEQ ID NO: 1211 - protein, 315 aa, Kosakonia cowanii
MAVINTNTLSLMTQNNLTKSQSSLGTSIERLSSGLRINSAKDDAAGQAIANRFTSNINGLSVASRNANDGISLAQTAEGALSEVNNNLQRIRDLTVQAQNSSNSASDIDSIQSEVNERMKEIDRVTTQTDFNGQKILNNQTAAAKSYNFQVGAKDGETISISMDSAAGWNLASASGSTTVSPAAGVYHNTRAAASLATVAGNARSVAAVGFDVVSGKISGAAAGTGSPLKDIDAAIKAVDSQRSSLGASQNRFESTITNLSNTVSNLSAARSRIQDSDYATEVSNMSRAQILQQAGSSVLAQANQVPQTMLSLLR

SEQ ID NO: 1212 - protein, 317 aa, Kosakonia cowanii
MAVINTNTLSLMTQNNLTKSQSSLGTSIERLSSGLRINSAKDDAAGQAIANRFTSNINGLSVASRNANDGISLAQTAEGALSEVNNNLQRIRDLTVQAQNSSNSASDIDSIQSEVNERMKEIDRVTTQTDFNGQKILNNQTAAAKSYNFQVGAKDGETISISMNGAAGWNLASAKTDGTTTTPTAGGTYANTRAAASLATVAGNARSVAAVGFDVVSGKISGAAAGTGSPLKDIDAAIKAVDTQRSSLGASQNRFESTITNLSNTVSNLSAARSRIQDSDYATEVSNMSRAQILQQAGSSVLAQANQVPQTMLSLLR

SEQ ID NO: 1213 - protein, 417 aa, Kosakonia cowanii
MSQVINTNALSLVAQNNLNKSQGSLGTAIQRLSSGLRINSAKDDAAGQAISNRFTANINGLSQASRNANDGISIAQTTEGALNEINDNLQNIRRLSVQAQNGTNSDSDRQSIQDEIDARLDEINRISEQTEFNGVKVLSKDQSLSIQVGSNDGQTIDIELSKMDSSTLSMDGFSVANGIDTTTLTASTGTVKVDSGFDYDATKFTDGGAAPVTSIDDIVVDDNGDVFAVKGPEMYAVTEDPTTGEITFDSDTDVASSVVGTPTSVVGEDMMKDQAINMTGITGTLMEDGKGNYYVDDGAGNLTEATIDTTTWTATDTGKAVSTTPATSDPLTKIDEALAQVDEMRSGLGAVQNRFASVISNLNNTVNNLSESRSRILDADFASEVSEMSRANILQSAGTTVLAQANQVPQNVLSLLR

SEQ ID NO: 1214 - protein, 307 aa, Kosakonia cowanii
MRLSTSYIFQNRIDSLGDAMTGYNDLATRLSAGQTLLKPSDDPTGASQSVTLQTALSRMSQFDTARTYAQDALGQEDNTLDSIGNLLTENLTQKVIAGGNGAYSDEDRAALAEELQGIRDNLLDLANTKNSDGRYIFAGYKTGSAPFQVDGTYVGGDTAMTQVVSDSTEMQVGHTGSEVFMSGTPDDLFEALDNAIAQLKQPVTSDADRDALQAVLDDSNVSIKKNIDNLGKVRATVGTNMQQIESLGFSAEAQSINVQSRLQETLGSDWDSMITLLSQSKMSEFALNSSMTVFQSMQQLSIFKVMG

SEQ ID NO: 1215 - protein, 301 aa, Kosakonia cowanii
MAVINTNTLSLMTQNNLTKSQSSLGTAIERLSSGLRINSAKDDAAGQAIANRFTSNINGLSVAARNANDGISLAQTAEGALGEINNNLQRIRDLTVQAQNSSNSASDVDSIQAEVNQRMEEINRVTTQTDFNGIKVLNTGTGTSSYSFQVGAKDNETISISLSSSNAYNLYNATGATAQTTGQTINGNARSTAAEGFDVLQGTVSSGGVTNGSPLADIDAAIKSVDSQRSLLGASQNRFESTITNLNNTVSNLSSARSRIQDSDYATEVSNMSRAQILQQAGSSVLAQANQVPQTMLSLLR

SEQ ID NO: 1216 - protein, 302 aa, Kosakonia cowanii
MAVINTNTLSLINQNNLNKSQAAQSSAIQRLSSGLRINSAKDDAAGQAIANRFSSSINGMGVAARNANDAISLAQTAEGALSEINNNLQRIRDLAVQAQNSTNSASDIDSIQSEVNERMAEINRVTRQTDFNGIKILDSGSGSFGYGFQVGADDGEEIVLTIGGSDDYNLGANSGSIGEVSGEFIHGSARSVKAMGFDVLHGTVTPFSGAILNNPLAAIDDAIKAVDTQRSSLGAFQNRFESTINNLNQAANSLSAARSRINDADYGTEVSNMSRAQILQQAGSSVLAQANQVPQTMLSLLR

SEQ ID NO: 1217 - protein, 416 aa, Kosakonia cowanii
MSQVINTNALSLVAQNNLNKSQGSLGTAIQRLSSGLRINSAKDDAAGQAISNRFTANINGLSQASRNANDGISIAQTTEGALNEINDNLQNIRRLSVQAQNGTNSDSDRQSIQDEIDARLDEINRISEQTEFNGVKVLSKDQSLSIQVGSNDGQTIDIELSKMDSSTLSMDGFSVANGIDPTTLTASTGTVKVDSGFDYDVANFTDTAGTATAVDDIVVDDNGDVYAKVGAEMYAVTEDPTTGGISFDSSTDVSGSVVGTPTSVVGEDMMKDQTVDMTGITGTLMEDGKGNYYVDDGAGNLTEATIDTTTWTATDTGKAVSTTPATSDPLTKIDEALAQVDEMRSGLGAVQNRFASVISNLNNTVNNLSESRSRILDADFASEVSEMSRANILQSAGTTVLAQANQVPQNVLSLLR

SEQ ID NO: 1218 - protein, 160 aa, Kosakonia cowanii
NINGLGVAARNANDGISLAQTAEGALGEINNNLQRIRDLTVQAQNSSNSASDIDSIQAEVNQRMEEVNRVTTQTDFNGIKVLNTGTGSSSYSFQVGAKDNDTISISLSSSISYNLYNATGATAQTPGQTINGNARATAAEGFDVLQGTVSSGGATNGSPL

SEQ ID NO: 1219 - protein, 246 aa, Kosakonia cowanii
TKSQSSLGTAIERLSSGLRINSAKDDAAGQAIANRFTSNINGLGVAARNANDGISLAQTAEGALGEINNNLQRIRDLTVQAQNSSNSASDIDSIQAEVNQRMEEVNRVTTQTDFNGIKVLNTGTGSSSYDFQVGSKDNEKISISLSSSNSYNLYNATGATAQTTGQTINGNARATAAEGFDVLQGTVSSGGTTDGSPLADIDAAIKSVDSQRSLLGASQNRFESTITNLNNTVSNLSSARSRIQDS

SEQ ID NO: 1220 - protein, 101 aa, Kosakonia cowanii
SSSNSYNLYNATGATAQTTGQTINGNARATAAEGFDVLQGTVSSGGATNGSPLADIDAAIKSVDSQRSLLGASQNRFESTITNLNNTVSNLSSARSRIQDS

SEQ ID NO: 1221 - protein, 102 aa, Kosakonia cowanii
MAVINTNTLSLTTQNNLTKSQSSLGTAIERLSSGLRINSAKDDAAGQAIANRFTSNINGLGVAARNANDGISLAQTAEGALGEINNNLQRIRDLTVQAQNSS

SEQ ID NO: 1222 - protein, 301 aa, Kosakonia cowanii
MAVINTNTLSLMTQNNLTKSQSSLGTSIERLSSGLRINSAKDDAAGQAIANRFTSNINGLTVAARNANDGISLAQTAEGALSEINNNLQRIRDLTVQAQNSSNSASDIDSIQAEVNQRMEEVNRVTTQTDFNGIKVLNTGTGSSSYSFQVGAKDSETISISLTKSDSYNLYNATGATAATTGQTINGNKRSTAAEGFDVLKGTVDASGNTDGSPLADIDKAIKAVDDQRSLLGASQNRFESTITNLNNTVSNLSAARSRIQDSDYATEVSNMSRAQILQQAGSSVLAQANQVPQTMLSLLR

SEQ ID NO: 1223 - protein, 131 aa, Kosakonia cowanii
MLNTGSGTSTYNFQVGAKDGEKIGIDISSSDSYNLAAAGSSGTALNTKAMASGDTVNGTQRQTQAVGFDVLKGKVTGGASGTASGSTPLADIDAAIKSVDSQRSLLGASQNRFESTITNLNNTVSNLSSAR

SEQ ID NO: 1224 - protein, 146 aa, Kosakonia cowanii
MAVINTNTLSLMTQNNLTKSQSSLGTAIERLSSGLRINSAKDDAAGQAIANRFTSNINGLGVAARNANDGISLSQTAEGALGEINNNLQRIRDLTVQAQNSSNSASDIDSIQAEVNQRMEEVNRVTTPDRLQRHQSAEHRFRHQHL

SEQ ID NO: 1225 - protein, 237 aa, Kosakonia cowanii
MAVINTNTLSLTTQNNLTKSQSSLGTAIERLSSGLRINSAKDDAAGQAIANRFTSNINGLGVAARNANDGISLSQTAEGALGEINNNLQRIRDLTVQAQNSSNSASDIDSIQAEVNQRMEEVNRVTNQTDFNGIKVLNTGSGTSTYNFQVGAKDGEKIGIDISSSDSYNLAAAGPYSGLRLCDRSVEHVPRADPAAGWFFRAGAGQPGSADHAVPAALIRRITSYKRAPLVGAFFIL

SEQ ID NO: 1226 - protein, 301 aa, Kosakonia cowanii
MAVINTNTLSLMTQNNLTKSQSSLGTSIERLSSGLRINSAKDDAAGQAIANRFTSNINGLTVAARNANDGISLAQTAEGALSEVNNNLQRIRDLTVQAQNSSNSASDIDSIQAEVNQRMEEINRVTTQTDFNGIKVLNTGTGSSSYSFQVGSKDSETISISLTKSDSYNLYNATGATAQTTGQTINGNKRSTAAEGFDVLKGTVDASGSTDGSPLADIDKAIKAVDDQRSLLGASQNRFESTITNLNNTVSNLSAARSRIQDSDYATEVSNMSRAQILQQAGSSVLAQANQVPQTMLSLLR

SEQ ID NO: 1227 - protein, 301 aa, Kosakonia cowanii
MAVINTNTLSLMTQNNLTKSQSSLGTSIERLSSGLRINSAKDDAAGQAIANRFTSNINGLGVAARNANDGISLAQTAEGALSEVNNNLQRIRDLTVQAQNSSNSASDIDSIQAEVNQRMEEINRVTTQTDFNGIKVLNTGTGSSSYSFQVGAKDNETISISLTKSDSYNLYNATGATAATTGQTINGNKRSTAAEGFDVLKGTVDASGKTDGGPLADIDKAIKAVDDQRSLLGASQNRFESTITNLNNTVSNLSAARSRIQDSDYATEVSNMSRAQILQQAGSSVLAQANQVPQTMLSLLR

SEQ ID NO: 1228 - protein, 188 aa, Kosakonia cowanii
MAVINTNTLSLMTQNNLTKSQSSLGTAIERLSSGLRINSAKDDAAGQAIANRFTSNINGLGVAARNANDGISLSQTAEGALGEINNNLQRIRDLTVQAQNSSNSASDIDSIQAEVNQRMEEVNRVTTQTDFNGIKVLNTGSGTSTYNFQVGAKDGEKIGIDISSSDSYNLAAAGLFRYCTEHQSHGFR

SEQ ID NO: 1229 - protein, 303 aa, Kosakonia cowanii
MAVINTNTLSLMTQNNLTKSQSSLGTSIERLSSGLRINSAKDDAAGQAIANRFTSNINGLSVAARNANDGISLSQTAEGALGEINNNLQRIRDLTVQAQNSSNSASDIDSIQAEVNQRMEEVNRVTNQTDFNGIKVLNTGSGTSTYNFQVGSKDGEKIGIDISSSDSYNLAAAGSSGTALNTKAMASGDTVNGTQRQTQAVGFDVLNGKVTGGASGSASGTTPLADIDAAIKSVDSQRSLLGASQNRFESTITNLNNTVSNLSSARSRIQDSDYATEVSNMSRAQILQQAGSSVLAQANQVPQ

SEQ ID NO: 1230 - protein, 329 aa, Kosakonia cowanii
MAVINTNTLSLMTQNNLTKSQSSLGTSIERLSSGLRINSAKDDAAGQAIANRFTSNINGLSVASRNANDGISLSQTAEGALGEINNNLQRIRDLTVQAQNSSNSASDIDSIQAEVNQRMEEVNRVTNQTDFNGIKVLNTGSGTSTYNFQVGSKDGEKIGIDISSSDSYNLAAAGSSGTALNTKAMASGDTVNGTQRQTQAVGFDVLNGKVTGGASGSASGTTPLADIDAAIKSVDSQRSLLGASQNRFESTITNLNNTVSNLSSAPQPYSGLRLCDRSVEHVPRADPAAGWFFRAGAGQPGSADHAVPAALITQCLIKPGLAGFFFAIF

SEQ ID NO: 1231 - protein, 193 aa, Kosakonia cowanii
MAVINTNTLSLTTQNNLTKSQSSLGTAIERLSSGLRINSAKDDAAGQAIANRFTSNINGLGVAARNANDGISLSQTAEGALGEINNNLQRIRDLTVQAQNSSNSASDIDSIQAEVNQRMEEVNRVTNQTDFNGIKVLNTGSGTSTYNFQVGAKDGEKIGIDISSSDSYNLAAAGSSGTALNTKAMASGDTVNG

SEQ ID NO: 1232 - protein, 146 aa, Kosakonia cowanii
MAVINTNTLSLMTQNNLTKSQSSLGTAIERLSSGLRINSAKDDAAGQAIANRFTSNINGLGVAARNANDGISLSQTAEGALGEINNNLQRIRDLTVQAQNSSNSASDIDSIQAEVNQRMEEVNRVTTQTDFNGIKVLNTGSGTSTY

SEQ ID NO: 1233 - protein, 107 aa, Kosakonia cowanii
QAIANRFTSNINGLSVASRNANDGISLAQTAEGALSEVNNNLQRIRDLTVQAQNSSNSASDIDSIQSEVNERMKEIDRVTTQTDFNGQKILNNQTAAAKSYNFQVGA

SEQ ID NO: 1234 - protein, 162 aa, Kosakonia cowanii
DIDSIQSEVNERMKEIDRVTTQTDFNGQKILNNQTAAAKSYNFQVGAKDGETISISMDSAAGWNLASASGSTTVSPAAGVYHNTRAAASLATVAGNARSVAAVGFDVVSGKISGAAAGTGSPLKDIDAAIKAVDTQRSSLGASQNRFESTITNLSNTVSNLS

SEQ ID NO: 1235 - protein, 164 aa, Kosakonia cowanii
DIDSIQSEVNERMKEIDRVTTQTDFNGQKILNNQTAAAKSYNFQVGAKDGETISISMNGAAGWNLASAKTDGTTSTPTAGGTYANTRAAASLATVAGNARSVAAVGFDVVSGKISGASAGTGSPLKDIDAAIKAVDTQRSSLGASQNRFESTITNLSNTVSNLS

SEQ ID NO: 1236 - protein, 93 aa, Kosakonia cowanii
MAVINTNTLSLMTQNNLTKSQSSLGTSIERLSSGLRINSAKDDAAGQAIANRFTSNINGLSVASRNANDGISLAQTAEGALSEVNNNLQRIRD

SEQ ID NO: 1237 - protein, 103 aa, Kosakonia cowanii
MEEVNRVTNQTDFNGIKVLNTGSGTSTYNFQVGAKDGEKIGIDISSSDSYNLAAAGSSGTALNTKAMASGDTVNGTQRQTQAVGFDVLKGKVTGGASGTASGS

SEQ ID NO: 1238 - protein, 118 aa, Kosakonia cowanii
MAVINTNTLSLMTQNNLTKSQSSLGTAIERLSSGLRINSAKDDAAGQAIANRFTSNINGLGVAARNANDGISLSQTAEGALGEINNNLQRIRDLTVQAQNSSNSASDIDSIQAEVNQR

SEQ ID NO: 1239 - protein, 119 aa, Kosakonia cowanii
MASGDTVNGTQRQTQAVGFDVLNGKVTGGASGSASGTTPLADIDAAIKSVDSQRSLLGASQNRFESTITNLNNTVSNLSSARSRIQDSDYATEVSNMSRAQILQQAGSSVLAQANQVPQ

SEQ ID NO: 1240 - protein, 211 aa, Kosakonia cowanii
MEEVNRVTNQTDFNGIKVLNTGSGTSTYNFQVGSKDGEKIGIDISSSDSYNLAAAGSSGTALNTKAMASGDTVNGTQRQTQAVGFDVLNGKVTGGASGSASGTTPLADIDAAIKSVDSQRSLLGASQNRFESTITNLNNTVSNLSSAPQPYSGLRLCDRSVEHVPRADPAAGWFFRAGAGQPGSADHAVPAALITQCLIKPGLAGFFFAIF

SEQ ID NO: 1241 - protein, 102 aa, Kosakonia cowanii
MAVINTNTLSLTTQNNLTKSQSSLGTAIERLSSGLRINSAKDDAAGQAIANRFTSNINGLGVAARNANDGISLSQTAEGALGEINNNLQRIRDLTVQAQNSS

SEQ ID NO: 1242 - protein, 150 aa, Kosakonia cowanii
MKEIDRVTTQTDFNGQKILNNQTAAAKSYNFQVGAKDGETISISMDSAAGWNLASASGSTTVSPAAGVYHNTRAAASLATVAGNARSVAAVGFDVVSGKISGAAAGTGSPLKDIDAAIKAVDTQRSSLGASQNRFESTITNLSNTVSNLS

SEQ ID NO: 1243 - protein, 67 aa, Kosakonia cowanii
MAKPSASLWTALLAGTSLLQVVQLPYLRLLAFTTTPVLLLLWLPLLVTPVALLQLVSTLSPVKSLVP

SEQ ID NO: 1244 - protein, 152 aa, Kosakonia cowanii
MKEIDRVTTQTDFNGQKILNNQTAAAKSYNFQVGAKDGETISISMNGAAGWNLASAKTDGTTSTPTAGGTYANTRAAASLATVAGNARSVAAVGFDVVSGKISGASAGTGSPLKDIDAAIKAVDTQRSSLGASQNRFESTITNLSNTVSNLS

SEQ ID NO: 1245 - protein, 65 aa, Kosakonia cowanii
MTQRVQAIANRFTSNINGLSVASRNANDGISLAQTAEGALSEVNNNLQRIRDLTVQAQNSSNSAS

SEQ ID NO: 1246 - protein, 133 aa, Kosakonia cowanii
DFNGQKILNNQTAAAKSCNFQVGAKDGETISISMNGAAGLNLASAKTDGTTSTPTAGGTYANTRAAASLATVAGNARSVAAVGFDVISGKISGASAGTGSPLKDIDAAIKAVDTQRSSLGASQNRFESTITNL

SEQ ID NO: 1247 - protein, 269 aa, Kosakonia cowanii
MQVINTNTLSLIAQNNLNKSQATLGTAIERLSSGRRINSAKDDAAGQAISNRFSAKINGLTQAARNANDGTSIAQTTEGALNEVNDNLQKIRTLTVQAKNGTNTDSDKQSIQDEIKQRLAEIDRISEQTEFNGIKVLSKDQSLSIQVGADDKQTIDIELKKMDSAELKMDDYDVTGADTDTLLATVDAALSTVSSLRSGLGAVQNRFDSVVNTLNSTVVNLTASQSRIQDADMATEVSNMSKGNMLQQAGTAVLAQANQSPQNILSLLR

SEQ ID NO: 1248 - protein, 301 aa, Kosakonia cowanii
MAVINTNTLSLMTQNNLTKSQSSLGTAIERLSSGLRINSAKDDAAGQAIANRFTSNINGLSVAARNANDGISLAQTAEGALGEINNNLQRIRDLTVQAQNSSNSASDVDSIQAEVNQRMEEINRVTTQTDFNGIKVLNTGTGSSSYSFQVGAKDNETISISLSSSNAYNLYNATGATAQTTGQTINGNARTTAAEGFDVLQGTVSSGGATNGSPLADIDAAIKSVDSQRSLLGASQNRFESTITNLNNTVSNLSSARSRIQDSDYATEVSNMSRAQILQQAGSSVLAQANQVPQTMLSLLR

SEQ ID NO: 1249 - protein, 418 aa, Kosakonia cowanii
MSQVINTNALSLVAQNNLNKSQGSLGTAIQRLSSGLRINSAKDDAAGQAISNRFTANINGLSQASRNANDGISIAQTTEGALNEINDNLQNIRRLSVQAQNGTNSDSDRQSIQDEIDARLDEINRISEQTEFNGVKVLSKDQSLSIQVGSNDGQTIDIELSKMDSSTLSMDGFSVANGIDPNTLTASTGTVKVDSGFDYDATKFNDSTTGTAVTSIDDIVVDDNGDVFAVKGAEMYAVTEDPTTGEISFDSGTDVASTVVGTPTSVVGEDMMKDQAINMTGITGTLMEDGKGNYYVDDGAGNLTEATIDTTTWAATDTGKAVSTTPATSDPLTKIDEALAQVDEMRSGLGAVQNRFASVISNLNNTVNNLSESRSRILDADFASEVSEMSRANILQSAGTTVLAQANQVPQNVLSLLR

SEQ ID NO: 1250 - protein, 202 aa, Kosakonia cowanii
NSSNSASDIDSIQAEVNQRMEEVNRVTTQTDFNGIKVLNTGTGSSSYDFQVGSKDNEKISISLSSSNSYNLYNATGATAQTTGQTINGNARATAAEGFDVLQGTVSSGGTTDGSPLADIDAAIKSVDSQRSLLGASQNRFESTITNLNNTVSNLSSARSRIQDSDYATEVSNMSRAQILQQAGSSVLAQANQVPQTMLSLLR

SEQ ID NO: 1251 - protein, 302 aa, Kosakonia cowanii
MAVINTNTLSLINQNNLNKSQAAQSSAIQRLSSGLRINSAKDDAAGQAIANRFSSSINGMGVAARNANDAISLAQTAEGALSEINNNLQRIRDLAVQAQNSTNSASDVDSIQSEVNERMAEINRVTRQTDFNGIKILDSGSGSFGYGFQVGADDGEEIVLTIGSSDDYNLGANSGSIGEVSGEFIHGSARSVKAMGFDVLHGTVTPYSGAILNNPLAAIDDAIKAVDTQRSSLGAFQNRFESTINNLNQAATSLSAARSRINDADYGTEVSNMSRAQILQQAGSSVLAQANQVPQTMLSLLR

SEQ ID NO: 1252 - protein, 202 aa, Kosakonia cowanii
NSSNSASDIDSIQAEVNQRMEEVNRVTTQTDFNGIKVLNTGTGSSSYSFQVGAKDNETISISLSSSNSYNLYNATGATAQTTGQTINGNARSTAAEGFDVLKGTVSSGGATDGSPLADIDAAIKSVDSQRSLLGASQNRFESTITNLNNTVSNLSSARSRIQDSDYATEVSNMSRAQILQQAGSSVLAQANQVPQTMLSLLR

SEQ ID NO: 1253 - protein, 81 aa, Kosakonia cowanii
AIKAVDDQRSLLGASQNRFESTITNLNNTVSNLSAARSRIQDSDYATEVSNMSRAQILQQAGSSVLAQANQVPQTMLSLLR

SEQ ID NO: 1254 - protein, 52 aa, Kosakonia cowanii
VSNLSAARSRIQDSDYATEVSNMSRAQILQQAGSSVLAQANQVPQTLLSLLR

SEQ ID NO: 1255 - protein, 88 aa, Kosakonia cowanii
TTGQTINGNKRSTAAEGFDVLKGTVDASGNTDGSPLADIDKAIKAVDDQRSLLGASQNRFESTITNLNNTVSNLSAARSRIQDSDYAT

SEQ ID NO: 1256 - protein, 308 aa, Kosakonia cowanii
MAVINTNTLSLMTQNNLTKSQSSLGTSIERLSSGLRINSAKDDAAGQAIANRFTSNINGLTVAARNANDGISLAQTAEGALSEINNNLQRIRDLTVQAQNSSNSASDIDSIQAEVNQRMEEVNRVTTQTDFNGIKVLNTGTGSSSYSFQVGAKDSETISISLTKSDSYNLYNATGATAATTGQTINGNKRSTAAEGFDVLKGTVDASGNTDGSPLADIDKAIKAVDDQRSLLGASQNRFESTITNLNNTVSNLSAARSRIQDSDYATEVSNMSRAQILQQAGSSVLATGQPGSADHAVPAALIRRHQL

SEQ ID NO: 1257 - protein, 301 aa, Kosakonia cowanii
MAVINTNTLSLMTQNNLTKSQSSLGTAIERLSSGLRINSAKDDAAGQAIANRFTSNINGLSVAARNANDGISLAQTAEGALGEINNNLQRIRDLTVQAQNSSNSASDVDSIQAEVNQRMEEINRVTTQTDFNGIKVLNTGTGTSSYSFQVGAKDNETISISLSSSNAYNLYNATGATAQTTGQTINGNARTTAAEGFDVLQGTVSSGGATNGSPLADIDAAIKSVDSQRSLLGASQNRFESTITNLNNTVSNLSSARSRIQDSDYATEVSNMSRAQILQQAGSSVLAQANQVPQTMLSLLR

SEQ ID NO: 1258 - protein, 136 aa, Kosakonia cowanii
MAVINTNTLSLTTQNNLTKSQSSLGTAIERLSSGLRINSAKDDAAGQAIANRFTSNINGLGVAARNANDGISLAQTAEGALGEINNNLQRIRDLTVQSQNSSNSASDIDSIQAEVNKRMEEVNRVTTQTDFNGIKC

SEQ ID NO: 1259 - protein, 183 aa, Kosakonia cowanii
MEEVNRVTTQTDFNGIKVLNTGTGSSSYSFQVGAKDNETISISLSSSNSYNLYNATGATAQTTGQTINGNARSTAAEGFDVLKGTVSSGGATDGSPLADIDAAIKSVDSQRSLLGASQNRFESTITNLNNTVSNLSSARSRIQDSDYATEVSNMSRAQILQQAGSSVLAQANQVPQTMLSLLR

SEQ ID NO: 1260 - protein, 302 aa, Kosakonia cowanii
MAVINTNTLSLINQNNLNKSQAAQSSAIQRLSSGLRINSAKDDAAGQAIANRFSSSISGMGVAARNANDAISLAQTAEGALSEINNNLQRIRDLAVQAQNSTNSASDVDSIQSEVNERMAEINRVTRQTDFNGIKILDSGSGSFGYGFQVGADDGEEIVLTIGSSDDYNLGANSGSIGEVSGESIHGSARSVKAMGFDVLHGTVTPYSGAILNNPLAAIDDAIKAVDTQRSSLGAFQNRFESTINNLNQAANSLSAARSRINDADYGTEVSNMSRAQILQQAGSSVLAQANQVPQTMLSLLR

SEQ ID NO: 1261 - protein, 105 aa, Kosakonia cowanii
EINNNLQRIRDLTVQAQNSSNSASDIDSIQAEVNQRMEEVNRVTTQTDFNGIKVLNTGTGSSSYDFQVGSKDNEKISISLSSSNSYNLYNATGATAQTTGQTING

SEQ ID NO: 1262 - protein, 194 aa, Kosakonia cowanii
IDSIQAEVNQRMEEINRVTTQTDFNGIKVLNTGTGSSSYSFQVGAKDNETISISLTKSDSYNLYNATGATAATTGQTINGNKRATAAEGFDVLKGTVDASGKTNGAPLADIDAAIKAVDDQRSLLGASQNRFESTITNLNNTVSNLSAARSRIQDSDYATEVSNMSRAQILQQAGSSVLAQANQVPQTMLSLLR

SEQ ID NO: 1263 - protein, 263 aa, Kosakonia cowanii
MAVINTNTLSLMTQNNLTKSQSSLGTSIERLSSGLRINSAKDDAAGQAIANRFTSNINGLTVAARNANDGISLAQTAEGALSEVNNNLQRIRDLTVQAQNSSNSASDIDSIQAEVNQRMEEINRVTTQTDFNGIKVLNTGTGSSSYSFQVGSKDSETISISLTKSDSYNLYNATGATAQTTGQTINGNKRSTAAEGFDVLKGTVDASGSTDGSPLADIDKAIKAVDDQRSLLGASQNRFESTITNLNNTVSNLSAARSRIQDS

SEQ ID NO: 1264 - protein, 148 aa, Kosakonia cowanii
MAVINTNTLSLMTQNNLTKSQSSLGTSIERLSSGLRINSAKDDAAGQAIANRFTSNINGLGVAARNANDGISLAQTAEGALSEVNNNLQRIRDLTVQAQNSSNSASDIDSIQAEVNQRMEEINRVTTQTDFNGIKVLNTGTGSSSYSF

SEQ ID NO: 1265 - protein, 263 aa, Kosakonia cowanii
MAVINTNTLSLMTQNNLTKSQSSLGTSIERLSSGLRINSAKDDAAGQAIANRFTSNINGLTVAARNANDGISLAQTAEGALSEINNNLQRIRDLTVQAQNSSNSASDIDSIQAEVNQRMEEVNRVTTQTDFNGIKVLNTGTGSSSYSFQVGAKDSETISISLTKSDSYNLYNATGATAATTGQTINGNKRSTAAEGFDVLKGTVDASGNTDGSPLADIDKAIKAVDDQRSLLGASQNRFESTITNLNNTVSNLSAARSRIQDS

SEQ ID NO: 1266 - protein, 120 aa, Kosakonia cowanii
IDAAIKSVDSQRSLLGASQNRFESTITNLNNTVSNLSSARSRIQDSDYATEVSNMSRAQILQQAGFFRAGPGQPGSADHAVPAALIRRSHSTKKRRLPALFYFLRCFFFRQNVFKKHKKD

SEQ ID NO: 1267 - protein, 211 aa, Kosakonia cowanii
MAVINTNTLSLTTQNNLTKSQSSLGTAIERLSSGLRINSAKDDAAGQAIANRFTSNINGLGVAARNANDGISLAQTAEGALGEINNNLQRIRDLTVQAQNSSNSASDIDSIQAEVNQRMEEVNRVTTQTDFNGIKVLNTGTGSSSYDFQVGSKDNEKISISLSSSNSYNLYNATGATAQTTGQTINGNARATAAEGFDVLQGTYRCGDQIG

SEQ ID NO: 1268 - protein, 320 aa, Kosakonia cowanii
MAVINTNTLSLMTQNNLTKSQSSLGTAIERLSSGLRINSAKDDAAGQAIANRFTSNINGLSVAARNANDGISLAQTAEGALGEINNNLQRIRDLTVQAQNSSNSASDVDSIQAEVNQRMEEINRVTTQTDFNGIKVLNTGTGTSSYSFQVGAKDNETISISLSSSNAYNLYNATGATAQTTGQTINGNARSTAAEGFDVLQGTVSSGGATNGSPLADIDAAIKSVDSQRSLLGASQNRFESTITNLNNTVSNLSSAPQPYSGLRLRDRSVEHVPRADPAAGRFFRAGPGQPGSADHAVPAALITAYAVQKSAACRRFLFV

SEQ ID NO: 1269 - protein, 418 aa, Kosakonia cowanii
MSQVINTNALSLVAQNNLNKSQGSLGTAIQRLSSGLRINSAKDDAAGQAISNRFTANINGLSQASRNANDGISIAQTTEGALNEINDNLQNIRRLSVQAQNGTNSDSDRQSIQDEIDARLDEINRISEQTEFNGVKVLSKDQSLSIQVGSNDGQTIDIELSKMDSSTLSMDGFSVANGIDPTTLTASTGTVKVDSGFDYDATKFNDSTTGTAVTSIDDIVVDDNGDVFAVKGAEMYAVTEDPTTGEISFDSGTDVASTVVGTPTSVVGEDMMKDQAINMTGITGTLMEDGKGNYYVDDGAGNLTEATIDTTTWTATDTGKAVSTTPATSDPLTKIDEALAQVDEMRSGLGAVQNRFASVISNLNNTVNNLSESRSRILDADFASEVSEMSRANILQSAGTTVLAQANQVPQNVLSLLR

SEQ ID NO: 1270 - protein, 133 aa, Kosakonia cowanii
MAVINTNTLSLMTQNNLTKSQSSLGTSIERLSSGLRINSAKDDAAGQAIANRFTSNINGLGVAARNANDGISLAQTAEGALSEVNNNLQRIRDLTVQAQNSSNSASDIDSIQAEVNQRMEEINRVTTQTDFNG

SEQ ID NO: 1271 - protein, 133 aa, Kosakonia cowanii
MAVINTNTLSLMTQNNLTKSQSSLGTSIERLSSGLRINSAKDDAAGQAIANRFTSNINGLTVAARNANDGISLAQTAEGALSEVNNNLQRIRDLTVQAQNSSNSASDIDSIQAEVNQRMEEINRVTTQTDFNG

SEQ ID NO: 1272 - protein, 128 aa, Kosakonia cowanii
MLNTGTGSSSYSFQVGSKDSETISISLTKSDSYNLYNATGATAQTTGQTINGNKRSTAAEGFDVLKGTVDASGSTDGSPLADIDKAIKAVDDQRSLLGASQNRFESTITNLNNTVSNLSAARSRIQDS

SEQ ID NO: 1273 - protein, 370 aa, Kosakonia cowanii
MHKLVAMYLPQFHPVKRNNEWWGEGFTEWRNVVKAKPRFPGHHQPQLPADLGYYDLRLAETRNHQAKMAKEHGIHGFCYYHYWFNGELLLEQPVEAMLNSQDPDFPFCLCWANENWTRAWDGMEREVLIKQDYTADDAMAHMRYLAPYFKDKRHIRVGDKPVFLIYRVDNIPEPKKYIQSLRNYAAENGVPALHLVAVKNGFVELPDAEILSLGFDAIMDFQPNRADFPKQNKSSSQRLVDIARKVLPASVYQALKGNVSAVNRIDYKQLVAEKTAQVWPKDYVKYPAVFPSWDNTARRKTPTVIQNNDPADYQKWLEYAIVSTSSYDDDQQFVFINAWNEWAEGCHLEPDEKMGKTFLDVTKKVIERHS

SEQ ID NO: 1274 - protein, 357 aa, Kosakonia cowanii
MDFYTFSSREILSVDKSNWFGIVKNQFSFYFAFYILSFPLTYLLFYFGFLSQEYIVWFYLILVAEHLSQESMRLLVVLDKAFKANLSLFIRSGIWVYIAVVVMFFDIDLRQVSVILILWLIGSSASVILIIPDLIELRRSAIGSRNIDLGWMWKGVKVAVPLLVGTLALRSLYIVDRYSLSYFSDYSAVGIYSFYSSFANALLAFVDAVVVMQLYPKIVSAVKQSDAVNLRVYKKKFITSVAFLSLVLFITLPVGVYILLKWMNKPEYFSYFSVLAVLMAACVIYCFALLPHYELYARNEDRKIIFSSLWAAAVGAIAMPAGAYYYGVYGVAAGQLLAVIFLCIYKVILLRKSKLNV

SEQ ID NO: 1275 - protein, 309 aa, Kosakonia cowanii
MFKNICVIVPTCNGGAIWKQAASELSKLQSEHVKVVAIDSESTDSTRQIAVDYGFDVLDVKRTNFNHGGTRNLAAQYCIEKLNAGLLIFLTQDAILQSAETVIAEITKAFSANTKLSALYGRQLPHDNANAIAQHARYYNYKNSGYKATPENHKAMGLKAVFLSNSFAVYSVDIFIQLNGFPENTILCEDMFYAAKSIQNGFAIAYCPDVAVKHSHNYSPVDEFKRYFDIGVFHAEEPWIGKYFGGASGEGKNFLISEFKFLLKNKPLLMLNASVNNAMKILGYKVGKNYKKLPASLCKKLSMHKAYWK

SEQ ID NO: 1276 - protein, 461 aa, Kosakonia cowanii
MAIVDTINVILPFFLSLGIIDYITSNLPRFIPQREFDDRVITHISLSLICTAWFWLRLRHYSYRKPFWFELKEILRTLAIFAIIELSVIAFSKWQSSRYLWVLTWTLTMLMVPIGRTVARRILDRFGYWKKTTIIIGTGKNAVDACSALRSEESLGFDVQYMFGTSPGYANKIEGVTFITDEAWLISHFKDKVAQFVIAVESDETDVRDYWLKTLSINGFRHVSVIPTTRGLPLYGTDMAFLFSHEVMIFRVNNNLAKRTSRFVKRTFDIICSLLIILISSPLMIYLWYKVTRDGGPAIYGHMRVGRHGKLFPCYKFRSMVMNSQEVLQQLLSTDPEARAEWERDFKLKNDPRITPVGRFIRRTSLDELPQLFNVLRGQMSLVGPRPIISEELSRYDENVDYYLMAKPGMTGLWQVSGRNDVDYDTRVYFDSWYVKNWSLWNDIAILFKTIKVVLHRDGAY

SEQ ID NO: 1277 - protein, 287 aa, Kosakonia cowanii
MSNNHFLQLSNVAIRGLTLASKFLLIFFLARFLEPAELGIYGLLTATVGYSLYLLGFDFYTYSTRELLKRGREEWGGVIKAQAALTVLLYAIFLPLLSLIFVEDLLPMSVIGWFFALLILEHLTQELGRLLVAVSDQLYASLMLFFRSGVWAVLVTGLMFVMPEARDLNVVFGAWAVGGGIALLLGICRIKRMRLDGWRQEVDWAWIIKGLKIAFALLVATLAIRGLFTLDRYWFQALAGMEVLGAYVLFTGISMALISFLDAGVFAFIYPDLISSYQRSDGDGFRR

SEQ ID NO: 1278 - protein, 226 aa, Kosakonia cowanii
AGPRLHSRPVAGLPLVHVDFPRMEGSSRFLKRVFDLIGSAALLLVFSPVFLVTAIAIKIDGPGRVFYHQERIGRGGRTFGMRKFRSMVANADDQLASLLDLQGSSETPLFKVSDDPRITKNGRFLRKHSIDELPQLINVLRGEMSLVGPRPQRAAEVALYDDIALRRLAVKPGMSGLWQVSGRSTLSWEETIRLDLYYVENWSLTQDVVILFRTIRAVVAPGASAH

SEQ ID NO: 1279 - protein, 357 aa, Kosakonia cowanii
MDFYTFSSREILSVDKSNWFGIVKNQFSFYFAFYILSFPLTYLLFYFGFLSQEYIVWFYLILVAEHLSQESMRLLVVLDKAFKANLSLFIRSGIWVYIAVVVMFFDIDLRQVSVILILWLIGSSASVILIIPDLIQLRRSAIGSRNIDLGWMWKGVKVAVPLLVGTLALRSLYIVDRYSLSYFSDYSAVGIYSFYSSFANALLAFVDAVVVMQLYPKIVSAVKQSDAVNLRVYKKKFITSVAFLSLVLFITLPVGVCVLLKWMNKPEYFSYFSVLAILMAACVIYCFALLPHYELYARNEDRKIIFSSLWAAVVGAIAMPAGAYYYGVYGVAAGQLLAVIFLCFYKVILLRKSKLNV

SEQ ID NO: 1280 - protein, 370 aa, Kosakonia cowanii
MHKLVAMYLPQFHPVKRNNEWWGEGFTEWRNVVKAKPRFPGHHQPQLPADLGYYDLRLAETRNHQAKMAKEHGIHGFCYYHYWFNGELLLEQPVEAMLNSQDPDFPFCLCWANENWTRAWDGMEREVLIKQDYTADDAMAHMRYLAPYFKDKRHIRVGDKPVFLIYRVDNIPEPKNYIQSLRNYAAENGVPALHLVAVKNGFVELPDAEILSLGFDAIMDFQPNRADFPKQNKSSSQQLVDIARNVLPASVYQALKGNVSAVNRIDYKQLVAEKTAQVWPKDYVKYPAVFPSWDNTARRKTPTVIQNNDPADYQKWLEYAIVSTSSYDDDQQFVFINAWNEWAEGCHLEPDEKMGKTFLDVTKKVIERHS

SEQ ID NO: 1281 - protein, 461 aa, Kosakonia cowanii
MAIVDTINVILPFFLSLGIIDYITSNLPRFIPQREFDDRVITHISLSLICTAWFWLRLRHYSYRKPFWFELKEILRTLAIFAIIELSVIAFSKWQSSRYLWVLTWTLTMLMVPIGRTVARRILDRFGYWKKTTIIVGTGKNAVDACSALRSEESLGFDVQYMFGTSPGYANKTEGVTFITDEAWLISHFKDKVAQFVIAVESDETDVRDYWLKTLSINGFRHVSVIPTTRGLPLYGTDMAFLFSHEVMIFRVNNNLAKRTSRFVKRTFDIICSLLIILISSPLMIYLWYKVTRDGGPAIYGHMRVGRHGKLFPCYKFRSMVMNSQEVLQQLLSTDPEARAEWERDFKLKNDPRITPVGRFIRRTSLDELPQLFNVLRGQMSLVGPRPIISEELSRYDENVDYYLMAKPGMTGLWQVSGRNDVDYDTRVYFDSWYVKNWSLWNDIAILFKTIKVVLHRDGAY

SEQ ID NO: 1282 - protein, 309 aa, Kosakonia cowanii
MFKNICVIVPTCNGGAIWKQAASELSKLQSEHVKVVAIDSESTDSTRQIAVDYGFDVLDVKRSNFNHGGTRNLAAQYCIEKLNAGLLIFLTQDAILQSAETVIAEITKAFSADPKLSALYGRQLPHDNANAIAQHARYYNYKNSGYKATPENHKAMGLKAVFLSNSFAVYSVDIFIQLNGFPENTILCEDMFYAAKSIQNGFAIAYCPDVAVKHSHNYSPVDEFKRYFDIGVFHAEEPWIGKYFGGASGEGKNFLISEFKFLLKNKPLLMLNASVNNAMKILGYKIGKNYKKLPASLCKKLSMHKAYWK

SEQ ID NO: 1283 - protein, 275 aa, Kosakonia cowanii
GQANIISPGIEVALCASGDLHVEKADWLARLPLRQIFVVHDASTLQVLNPQLRAMGGLLGLELCSAIHRPRNLRLKRMLDLIVAVPIALAAVPVVALLALAVKAVDNGPAFYAQPRIGRNGHVFKVYKLRSMYADAEARLAAHLEADSAARQEWERFFKLSDDPRILPRIGQFIRHSSLDELPQLWNVLRGDMSIVGPRPFPAYHNQCFDTAFQALRTSVPPGLTGLWQVTDRSDGDLAVQKRQDSFYIHNWSFWLDFYVLLQTVPAVLHGRGAK

SEQ ID NO: 1284 - protein, 344 aa, Kosakonia cowanii
MDKSNWFGIVKNQFSFYFAFYILSFPLTYLLFYFGFLSQEYIVWFYLILVAEHLSQESMRLLVVLDKAFKANLSLFIRSGIWVYIAVVVMFFDIDLRQVSVILILWLIGSSASVILIIPDLIQLRRSAIGSRNIDLGWMWKGVKVAVPLLVGTLALRSLYIVDRYSLSYFSDYSAVGIYSFYSSFANALLAFVDAVVVMQLYPKIVSAVKQSDAVNLRVYKKKFITSVAFLSLVLFITLPVGVCVLLKWMNKPEYFSYFSVLAILMAACVIYCFALLPHYELYARNEDRKIIFSSLWAAVVGAIAMPAGAYYYGVYGVAAGQLLAVIFLCFYKVILLRKSKLNV

SEQ ID NO: 1285 - protein, 370 aa, Kosakonia cowanii
MKKLIAMYLPQFHPVKRNNEWWGEGFTEWRNVVKAKPRFPGHHQPQLPADLGYYDLRLAETRNHQAKMAKEHGIHGFCYYHYWFNGELLLEQPVEAMLNSQDPDFPFCLCWANENWTRAWDGMEREVLIKQDYTADDAMAHMRYLAPYFKDKRHIRVGDKPVFLIYRVDNIPEPKNYIQSLRNYAAENGVPALHLVAVKNGFVELPDAEILSLGFDAIMDFQPNRADFPKQNKSSSQQLVDIARNVLPASVYQALKGNVSAVNRIDYKQLVAEKTAQVWPKDYVKYPAVFPSWDNTARRKTPTVIQNNDPADYQKWLEYAIVSTSSYDDDQQFVFINAWNEWAEGCHLEPDEKMGKTFLDVTKKVIERHS

SEQ ID NO: 1286 - protein, 230 aa, Kosakonia cowanii
MTGHIAIIPARGGSKRLPGKNIKLLNGKPLIQWSVEAALQSKLFDRIIVSTDAIEIKDAAERAGAEVPYLRSAELSSDTATTDDVVQDVVQWLETQGTEVSTVTILQPTSPLRTAKNIIDAFALMQEKQARAIISVCPLEHPIQYCNALPDDLSLDKFIDVANLKRTQDLPPFYRLNGAIYLFQRDYVSHFRNIYSKGTYAYVMSKSQSVDIDEEIDFEFAQLLMAKRSD

SEQ ID NO: 1287 - protein, 358 aa, Kosakonia cowanii
MTLIIAEAGVNHNGQRDLAFKLVDAAHRAGADIVKFQTFKSKSLVTESAAQAEYQITNTNKTESQLAMLSRLELSYETHRELIEYCNDLGIEFLSTAFDEESLNFLVSDLGLKKLKVPSGELTNAPFVLAHALTGCDIMLSTGMASLAEIEDALGVIAFGYTTNGNITPSKAEFEKAYASEAGQQALKSKVRILHCTTEYPAPMKEINLRAMDAISVAFGLPTGYSDHSEGIAIPVAAVARGAVIIEKHFTLDKNMEGPDHKASLEPDELTEMIKSIRNVELALGDGVKRPTPSEQKNKTIARRSIVAATTISKGSVFSEDNLAIKRPGDGMSPYSYWDLLGKVAGKNYGEGDKISND

SEQ ID NO: 1288 - protein, 236 aa, Kosakonia cowanii
MNVAIIPARGGSKRIPRKNIKTFCGKPMIAWSIEAAQKSGVFDRIIVSTDDEEIATVAKCFGAEVPFVRPEELSNDYAGTIPVIRHATCWLKEQGYNVTNVCCIYATAPFITHDDIIRGLDTLENHTADYAFTVTRFPYPIQRALKIDQYNKIGMFNPEMFHVRSQDLEESWHDAGQFYWGTRMAWEQEKPIFTSDSYPVILPAERVQDIDTPEDWRVAEWLYKAMEFKNEHFSAG

SEQ ID NO: 1289 - protein, 332 aa, Kosakonia cowanii
MFNDKVILVTGGTGSFGNKFVRMTLEKYNPKKIIIYSRDEMKQWEMAKHFKDESRIRFFIGDVRDKERLYRALDGVDFVVHAAATKIVPTAEYNPFECVKTNINGAMNVIDACIDKGIERVVALSTDKASSPANLYGATKLASDKLFVAGNSYSGAYKTRFAVVRYGNVMGSRGSVIPFFLSIKEKGELPITDDRMTRFMITLEQGVELVWHAFQDMVGGEIYVKKIPSMKVTDVASAVAPEATQKVVGIRPGEKLHEQMISAEDAHYTYEYPEHFKILPAIHNWCDSPERIKDGKRVPEGFVYESDSNTEWMSVEELRQWIEVNRDKVGNI

SEQ ID NO: 1290 - protein, 383 aa, Kosakonia cowanii
MKFIPYGRQDISHEDIQAVVDVLQSDFLTQGPCVPQFEQAIANYVGVKHALAVNSATSALHIACMALGVKEGDWLWTTPNTFVASANCARYCNANVSFVDIDPATYNMSVSALETKLRKAKAEGTLPKVLVPVAFAGQSCEMEAIHTLAREYGFAIIEDASHAIGGKYQGEQIGNSKYADITILSFHPVKIITTAEGGMALTNNDELAEKLALLRSHGITRDADKMTKEAEGGWYYQQVDLGLNYRMTELQAALGVSQLNRIDEFVAARHRLAKRYDAQLAGVPVTLPHQAESGYSALHLYPIMVNDPAKRKPLFDHLREKGIGVNVHYIPVHTQPYYQQLGHKVGDYPVSEEYYSRAISIPMYSTLSEEEQDFVIKCIREFF

SEQ ID NO: 1291 - protein, 508 aa, Kosakonia cowanii
MNIFLRVDSSLSIGTGHVVRCLNLANALRNTGAKCHFISKQHTGNVIPKIHCHGFSVSIIPGAPEPENYIVDEKSWLNATQAQDASDFISLVEQASVKPDVIIVDHYSIDYEWEYSVKKQYPLVRLVVIDDLCNRPHYADVIIDQTFKRTPEEYGALNKANGQIFSGTSYALINPAFVALSAKSIKRKKALQDPKSVLITMGGVDAQNVTEMILTWLNENEIIFFEKITIVMGRASPHQSAVREAAKHARLPVEVLVDVDTMPELMLEHDLAIGALGGTTWERCVMGLPAVNIAIADNQMTIAESLRSSGAIVLYANSLQPQTFTSALIDLITHYKEHMLLAMDICDGHGMSRVVQNILPQPAREGKNVMLRPATKSDIDFVYKLQCEPQTRKFARTPEIPAYDEHVAWMKRKLNDERVKFYIIECEIPCGVLRLDPIQHSGADFEISIFMTEKSQGKGIASAAIKRAMMLNNDVKMLATVLAENTASHLLFQRLGFTKISNSEYLSE

SEQ ID NO: 1292 - protein, 349 aa, Kosakonia cowanii
MNNFITINGRKIGKDYSPYIIAELSANHNGDINRAYKIMEEAKAAGADAIKLQTYRADTITIDHDSEDFQIHGGLWDGQTLFNLYKGAQMPWEWHEPLFAKAKELGITIFSSPFDFTAVDLLEKLDAPAYKIASFEAIDLPLIKYVAKTGKPMIISTGMADETEIQEAIDAAYEGGCRELVVLHCVSGYPAPAADYNLATIPDMAQRFNVIPGLSDHTIDNTTAIAAVVLGASVIEKHVTLDRNGGGPDDSFSLEPPELHALCRDAKTAWQALGRVNYERKESEKGNAKFRRSLYVVKDIKKGELFTTENIKSIRPGFGVAPKFYDHFIGKVATCDIKRGEPLKFDFIE

SEQ ID NO: 1293 - protein, 386 aa, Kosakonia cowanii
MSNFDDLYAYVEERDLRDRNFKNNIRSLYLKNAKWIFPFNDVLSSIFFFWLRPVKKKKYFFLGTRFKHLISALPVEEVCIIGGPKQLLYCLRNNIHYIPNGVFWKLLSKGFIVNNFSKIKQTAYKQSKLLGKIRHDTQQALMIVENDSLPIQRLYCNIAAESNIKTVCIQHGLFQSKTDPKTIDGWKCDYFICYDDKQKEVLSGLGIDRHKVMIGGFYEPIIQVKTYSKNPPFKVCFLGQPWFKYGDVYKNKYQHIVNVLSTSLREPESHFYFKPHPWEKDAEYLKNMSNVFMGSMQEAIESYDVFFSFTSTALLEVTMAGKVAIQIYDDLFACDNFETLGYAYSVKSDELKENIPALLRHTPYPLELPSFDHLVNQIKLLTKVIL

SEQ ID NO: 1294 - protein, 468 aa, Kosakonia cowanii
MSENSGKQFNSIFIIILSLTCVIAASVSSDLFIVAGSISLALFFAFCITIYKKQQYFFFLVLPFLFPQFTAIVSNFSLETGAFIEELKVTSYATGGATRLVFFVLSFFFVALVVFRFINKYRVNRFFFVLRGDYSKLERQLIFFVAGLIFLALTINALIWGSPLLKGVQRFDYWTAHPYPSFRNLLYQGYLLSFILGVYITKSKLTTQRKSWKYISLVLCFCFFNIVYGEKFTGVFLTLLYFFVGFFGALVLYKKINVVTGKNIIFVLIVGLLLYGLIYYQYKYIHQLPGSIFSFIESRVLNLQGEVWWAIDRKDYDGSALSYLYKYSSDCTETGGLYFLMYQIAPGSMVDSYCQRGITFTMGYPAILLPTAGYFLGYVLNLLFAALVGITLFLIKKSIEYPNVISLFLSAKVLLIETHALNMGNIYNILDVKFFAYFLLLLFFSELRLKNAQIGSHVPASIPSGQAK

SEQ ID NO: 1295 - protein, 230 aa, Kosakonia cowanii
MTGHIAIIPARGGSKRLPGKNIKLLNGKPLIQWSIEAALQSKLFERIIVSTDTIEIKDAAERAGAEVPYLRSAELSSDTATTDDVVRDVVQWLETQGAEVSTVTILQPTSPLRTAKNIIDAFALMQEKQARAIISVCPIEHPIQYCNALPDDLSLDNFIDVANLKRTQDLPPFYRLNGAIYLFQRDYVANFRNIYSKGTYAYIMSKSQSVDIDEEIDFEFAQLLMAKRTE

SEQ ID NO: 1296 - protein, 358 aa, Kosakonia cowanii
MTLIIAEAGVNHNGQRDLAFKLVDAAHQAGADIVKFQTFKSKSLVTESAAQAEYQITNTNKTESQLAMLSRLELSYETHRELIDYCNDLGIEFLSTAFDEESLNFLVSDLGLKKLKVPSGELTNAPFVLAHALTGCDIMLSTGMASLAEIEDALGVIAFGYTANGNITPSKAEFEKAYASEAGQQALKSKVRILHCTTEYPAPMKEINLRAMDAISVAFGLPTGYSDHSEGITIPVAAAARGAVIIEKHFTLDKNMEGPDHKASLEPDELTEMIKSIRNVELALGDGVKRPTPSEQKNKTIARRSIVAATTISKGSVFSEDNLAIKRPGDGLSPYSYWDLLGKAAGKDYGEGDKISND

SEQ ID NO: 1297 - protein, 358 aa, Kosakonia cowanii
MTLIIAEAGVNHNGQRDLAFKLVDAAHRAGADIVKFQTFKSKSLVTESAAQAEYQITNTNKTESQLAMLSRLELSYETHRELIEYCNDLGIEFLSTAFDEESLKFLVSDLGLKKLKVPSGELTNAPFVLAHALTGCDIMLSTGMASLAEIEDALGVIAFGYTTNGNITPSKAEFEKAYASEAGQQALKSKVRILHCTTEYPAPMKEINLRAMDAISVAFGLPTGYSDHSEGIAIPVAAVARGAVIIEKHFTLDKNMEGPDHKASLEPDELTEMIKSIRNVELALGDGVKRPTPSEQKNKTIARRSIVAATTISKGSVFSEDNLAIKRPGDGMSPYSYWDLLGKVAGKNYGEGDKISND

SEQ ID NO: 1298 - protein, 79 aa, Kosakonia cowanii
MFHAEHFNTRSQDLEESYHDAGQFYWGLASAWLAGHVIFSPASSAVVLPRHRVQDIDTPEDWVRAEWMYKAFQAESAKA

SEQ ID NO: 1299 - protein, 356 aa, Kosakonia cowanii
MNKFISIDGRKIGSDFPPYIIAEMSANHNGNKDSAFRIIEEAKKSGADAVKIQTYRPDTITLNSDGPDFQIKGGLWDGKTLYQLYEWAHTPWEWHRPMFDYARKLNITMFSSPFDSTAVDLFEDLNAPAYKIASFEAVDLALIKYVAATGKPMIISTGMADADEIAEAVEAAREGGCEELAILHCVSGYPAPAEDYNLRTIPDMINRHGLVTGLSDHTLDNTTAIASVALGAAIIEKHFTLDRSGGGPDDSFSLEPAELVALCRDSKTAWAALGNINYGRKSSEQGNVQFRRSLYFVRTLKKGEVITSDSIRSVRPGFGLAPKYLSSIVGRKVKCDIEANSPVLINLIAEPDNRII

SEQ ID NO: 1300 - protein, 226 aa, Kosakonia cowanii
VDYVVHAAATKIVPTAEYNPFECIKTNINGAMNLIDACIDKGIKRVVALSTDKASSPINLYGATKLASDKLFVAGNSYAGGHETRMAVVRYGNVMGSRGSVIPFFMSIKDKGELPITDERMTRFMISLEEGVELVWHAFEDMEGGEIYVKKIPSMKVTDLARVVAPDAKQKIVGIRPGEKLHEQMISAEDSYYTYEYPEHFKILPVINDWATCPKRIKDGKKVAEG

SEQ ID NO: 1301 - protein, 252 aa, Kosakonia cowanii
KVAVRYSRKLMVIDDLADRAHLCDLLLDQNLGRLPLDYKFYVPSDCELLIGPRYALLRKDFAELRNESLSRRASSSLKNIIITMGGVDEKNVTSRIMLALSALNLRSSINITVVMGGTSPWLKNVKDLAATMPYPTKVLSNIDNMAEVMLVSDLAIGAAGSTSWERCCLGLPSLFVILAANQMGIGKALQDSGSAISLGSPESPSFNEKITNSVNALLQDPSLLERLSAAAATVTDGAGCAALVSWLGKAQK

SEQ ID NO: 1302 - protein, 344 aa, Kosakonia cowanii
MFKNKVLLITGGTGSFGNAVLRRFLETDIAEIRIFSRDEKKQDDMRKKYNSNKLKFYIGDVRDYNSISNATRGVDFIYHAAALKQVPSCEFHPMEAVKTNVLGTENVLEAAINNEVKRVVCLSTDKAVYPINAMGISKAMMEKVMVAKSRNVNSAKTVICGTRYGNVMASRGSVIPLFVDLIKAGKALTITDPNMTRFMMTLEDAVDLVLYAFEHGNNGDIFVQKAPAATIETLAIALKELLNVNDHPINVIGTRHGEKLYEALLSREEMIASIDMGDYYRVPPDLRDLNYGKYVEQGDTRISVVDDYNSHNTQRLDVEGMKTLLLKLPFIRALRDGKNYELDA

SEQ ID NO: 1303 - protein, 120 aa, Kosakonia cowanii
MTPETTNTTTNTAASTMPATVQGAATRTVAIIPARGGSQGVPRKNVRRVGGVPLVERAVRSALASGRVDLVVVSTDDDEIAAVGASAGARIVRRPAALSGDTASSESAILHALDELDRAG

SEQ ID NO: 1304 - protein, 236 aa, Kosakonia cowanii
MNVAIIPARGGSKRIPRKNIKEFCGKPMIAWSIEAALKSGVFDHVIVSTDDEEIADVAQNYGAEVPFVRPAELSNDYAGTIPVIRHATVWLVEQGYDVQNVCCIYATAPFITHDDIIRGLEILKSHEADYAFTVTRFPYPIQRALKINQHDKIGMFNPEMFHVRSQDLEESWHDAGQLYWGTREAWEQEKPIFTSNAYPVILPAERVQDIDTPEDWRVAEWLFKAMEFKNEHFSAS

SEQ ID NO: 1305 - protein, 349 aa, Kosakonia cowanii
MNNFITINGRKIGKDYSPYIIAELSANHNGDINRAYKIMEEAKAAGADAIKLQTYRADTITIDHDSEDFQIHGGLWDGQTLFNLYKGAQMPWEWHEPLFAKAKELGITIFSSPFDFTAVDLLEKLDAPAYKIASFEAIDLPLIKYVAKTGKPMIISTGMADEAEIQEAIDAAYEGGCRELVVLHCVSGYPAPAADYNLATIPDMAQRFNVIPGLSDHTIDNTTAIAAVVLGASVIEKHVTLDRNGGGPDDSFSLEPSELHALCRDAKTAWQALGRVNYERKESEKGNAKFRRSLYVVKDIKKGELFTTENIKSIRPGFGVAPKFYDHFIGKVATCDIKRGEPLKFDFIE

SEQ ID NO: 1306 - protein, 332 aa, Kosakonia cowanii
MFNDKVILVTGGTGSFGNKFVRMTLEKYNPKKIIIYSRDEMKQWEMAKHFKDESRIRFFIGDVRDKERLYRALDGVDFVVHAAATKIVPTAEYNPFECVKTNINGAMNVIDACIDKGIERVVALSTDKASSPANLYGATKLASDKLFVAGNSYSGAYKTRFAVVRYGNVMGSRGSVIPFFLSIKEKGELPITDDRMTRFMITLEQGVELVWHAFQDMVGGEIYVKKIPSMKVTDVATAVAPEATQKVVGIRPGEKLHEQMISAEDAHYTYEYPEHFKILPAIHNWCDSPERIKDGKRVPEGFVYESDSNTEWMSVEELRQWINVNRDKVGNI

SEQ ID NO: 1307 - protein, 508 aa, Kosakonia cowanii
MNIFLRVDSSLSIGTGHIVRSLNLANALRNTGAECHFITKQHTGHIIPKIESQDFNVSIIPGAPESEGYIVDEKSWLNGTQAQDACEFIALVEQAAVKPEVIIVDHYSLDYEWEYAIKKQYPSARIVVIDDLCNRQHWADMIIDQTFKRTPEEYGALNKANGQIYSGTSYALINPAFVALSAKSIKRKKALQEPKSVLITMGGVDAQNVTETILTWLNENETTFFDKITIVMGRASPHQSAVREAAKHARFPVEVLIDVDTMPELMLEHDLAIGALGGTTWERCVMGLPAVNIAIADNQMTIAESLRSSGAIVLYADSLQSQTFMSALIDLITRYKEHMLLAMNICDGHGMSRVVQNILSQPAREGKNVILRPATERDIDFVYKLQCEPQTREFARNPEIPAYDDHVAWMKRKLNDERVKFYIIECEIACGVLRLDPIEHSGADFEISIFMTEKSQGKGIASAAIKRAMMLNNDVKMLATVLAANTASHLLFQRLGFTKISNSEYLSE

SEQ ID NO: 1308 - protein, 386 aa, Kosakonia cowanii
MSNFDDLYAYVEERDLRDKNFKTNIRSLYLKNAKWIFPFNDVLSSIFFFWLRPAKKKKYFFLGTRFTHLISALPVEEVCIIGGPKQLLYCLRNNIHYIPNGVFWKLLSKGFIVNNFSKIKQTAYKQGKLLGKIRHDTQQALMIVENDSLPIQRLYCNIAAESNIKTVCIQHGLFQSRTDPKTIDGWKCDYFICYDDKQKEVLSGLGIDRHKVMIGGFYEPIIQVKTYSKKPPLKVCFLGQPWFKYGDVYKNKYQHIVNVLSTSLREPESHFYFKPHPWEKDAEYLKNMSNVFMGSMQEAIESYDVFFSFTSTALLEVTMAGKVAIQIYDDLFACDNFETLGYAYSVKSDELKENIPALLRHTPYPLELPSFDHLVNQIKLLTKVIL

SEQ ID NO: 1309 - protein, 468 aa, Kosakonia cowanii
MSENSGKQFNSIFIIILSLTCVIAASVSSDLFIVAGSISLALFFAFCITIYKKQQYFFFLVLPFLFPQFTAIVSNFSLETGAFIEELKVTSYATGGATRLVFFVLSFFFVALVVFRFINKYRVNRFFFVLRGDYSKLERQLIFFVAGLIFLALTINALIWGSPLLKGVQRFDYWTAHPYPSFRNLLYQGYLLSFILGVYITKSKLTTQRKSWKYIFLVLCFCLFNIVYGEKFTGVFLTLLYFFVGFFGALVLYKKINVVTGKNIIFVLIVGLLLYGLIYYQYKYIHQLPGSIFSFIESRVLNLQGEVWWAIDRKDYDGSALSYLYKYSSDCTETGGLYFLMYQIAPGSMVDSYCQRGITFTMGYPAILLPTAGYFLGYVLNLLFAALVGITLFLIKKSIEYPNVISLFLSAKVLLIETHALNMGNIYNILDVKFFAYFLLLLFFSELRLKNAQIGSHVPASIPSGQAK

SEQ ID NO: 1310 - protein, 383 aa, Kosakonia cowanii
MKFIPYGRQDISGEDIQAVVDVLQSDFLTQGPCVPQFEQAIANYVGVKHALAVNSATSALHIACMALGMEEGDWLWTTPNTFVASANCARYCNGNVSFVDIDPATYNMSVAALETKLSYAKAEGTLPKVVVPVAFAGQSCEMEAIHKLSREYGFAIIEDASHAIGGKYQGEQIGNSKYADVTILSFHPVKIITTAEGGMALTNNDELAEKLALLRSHGITRDADKMTKEAEGGWYYQQVDLGLNYRMTELQAALGVSQLKRIDEFVAARHRLAKRYDAQLAGVPLTLPHQAESGYSALHLYPIMVNDSAKRKPLFDYLREKGIGVNVHYIPVHTQPYYQQLGHKVGDYPAAEEYYSRAISIPMYSTLSEDEQDFVINAIREFF

SEQ ID NO: 1311 - protein, 344 aa, Kosakonia cowanii
MFKNKVLLITGGTGSFGNAVLRRFLETDIAEIRIFSRDEKKQDDMRKKYNSNKLKFYIGDVRDYNSISNATRGVDFIYHAAALKQVPSCEFHPMEAVKTNVLGTENVLEAAINNEVKRVVCLSTDKAVYPINAMGISKAMMEKVMVAKSRNVNSAKTVICGTRYGNVMASRGSVIPLFVDLIQAGKALTITDPNMTRFMMTLEDAVDLVLYAFEHGNNGDIFVQKAPAATIETLAIALKELLNVNDHPINVIGTRHGEKLYEALLSREEMIASIDMGDYYRVPPDLRDLNYGKYVEQGDTRISAVDDYNSHNTQRLDVEGMKTLLLKLPFIRALRDGKNYELDA

SEQ ID NO: 1312 - protein, 236 aa, Kosakonia cowanii
MNVAIIPARGGSKRIPRKNIKEFCGKPMIAWSIEAALKSGVFDHVIVSTDDEEIADVAQNYGAEVPFVRPEELSNDYAGTIPVIRHATVWLVEQGYDVQNVCCIYATAPFITHDDIIRGLEILKSHEADYAFTVTRFPYPIQRALKINQHDKIGMFNPEMFHVRSQDLEESWHDAGQLYWGTREAWEQEKPIFTSNAYPVILPAERVQDIDTPEDWRVAEWLFKAMEFKNEHFSAS

SEQ ID NO: 1313 - protein, 351 aa, Kosakonia cowanii
MNNFITINGRKIGKDYSPYIIAELSANHNGDINRAYKIMEEAKAAGADAIKLQTYRADTITIDHDSEDFQIHGGLWDGQTLFNLYKGAQMPWEWHEPLFAKAKELGITIFSSPFDFTAVDLLEKLDAPAYKIASFEAIDLPLIKYVAKTGKPMIISTGMADEAEIQEAIDAAYEGGCRELVVLHCVSGYPAPAADYNLATIPDMAQRFNVIPGLSDHTIDNTTAIAAVVLGASVIEKHVTLDRNGGGPDDSFSLEPSELHALCRDAKTAWQALGRVNYERKESEKGNAKFRRSLYVVKDIKKGELFTTENIKSIRPGFGVAPKYMDNILGQTAARDIKYGEPVKMDMINAE

SEQ ID NO: 1314 - protein, 332 aa, Kosakonia cowanii
MFNDKVILVTGGTGSFGNKFVRMTLEKYNPKKIIIYSRDEMKQWEMAKHFKDESRIRFFIGDVRDKERLYRALDGVDFVVHAAATKIVPTAEYNPFECVKTNINGAMNVIDACIDKGIERVVALSTDKASSPANLYGATKLASDKLFVAGNSYSGAYKTRFAVVRYGNVMGSRGSVIPFFLSIKEKGELPITDDRMTRFMITLEQGVELVWHAFQDMVGGEIYVKKIPSMKVTDVATAVAPEATQKVVGIRPGEKLHEQMISAEDAHYTYEYPEHFKILPAIHNWCDSPERIKDGKRVPEGFVYESDSNTEWMSVEELRQWIDVNRDKVGNI

SEQ ID NO: 1315 - protein, 508 aa, Kosakonia cowanii
MNIFLRVDSSLSIGTGHIVRSLNLANALRNTGAECHFITKQHTGHIIPKIESQDFNVSIIPGAPESEGYIVDEKSWLNGTQAQDACEFIALVEQAAVKPEVIIVDHYSLDYEWEYAIKKQYPWARIVVIDDLCNRQHWADMIIDQTFKRTPEEYGALNKANGQIYSGTSYALINPAFVALSAKSIKRKKALQEPKSVLITMGGVDAQNVTETILTWLNENETTFFDKITIVMGRASPHQSAVREAAKHARFPVEVLIDVDTMPELMLEHDLAIGALGGTTWERCVMGLPAVNIAIADNQMTIAESLRSSGAIVLYADSLQSQTFMSALIDLITRYKEHMLLAMNICDGHGMSRVVQNILSQPAREGKNVILRPATERDIDFVYKLQCEPQTREFARNPEIPAYDDHVAWMKRKLNDERVKFYIIECEIACGVLRLDPIEHSGADFEISIFMTEKSQGKGIASAAIKRAMMLNNDVKMLATVLAANTASHLLFQRLGFTKISNSEYLSE

SEQ ID NO: 1316 - protein, 381 aa, Kosakonia cowanii
MLNSIYEYVISRSEDNNKFRQSIMDQYQRNARFSRMHIKALLLPLFMLTKAREKKKYFFFSTKYDEIITKLPRDEVCIIGGPKQLLFAVKNNLSLISNMDFWGELSEGLKDYKISPGLPGKSRALEAEISKLILPNSVFIIDNDSMPMQRLLIDIMRKCGAKICLVQDGIFQEKTAPHIIHGWYSDRVLCYDVYQQKIIANKLPNHIRIDVVGFYKKIHFYELSKNARKICFLGQPWYKYGEDYCEKYLSILSSVEGVFQNHEFYYKPHPWEDNAPYIHAIKNIAKGSMDEAFGNFDVFISLTSTALLEATLAGKIAIQVIDDKFECDDLATYNYAYSLSSGEINTDKFEQLINRGPILKVAPTVDTISLYTEYFQQEKYM

SEQ ID NO: 1317 - protein, 466 aa, Kosakonia cowanii
MRKFSLGTKVFIIYFFALTLSLISLTGFLDSHLVNFFSFICFLLYFLYIYREKQFLFFLLLPFSFPHLTAIISNIYLDTGVYISELSLLSEATGAASRLIFFVLTMFTMAHCVFSLLYNNMAGKTCYVKLPVRRFEDKALILFAVIIITALVFGLYKWGSPLSEGEQRFEYWKNHPLPWFKSLLYQTYLLGFLIGCIIIQATNKRILLFVLIVCLGLNVLYGEKFTGLMITVLYFICGFIVSYYINYGIPKRLVNVKTTLLAIVAFILVFSLVYYQYKYIHNVGNNVVGYILNRLFSLQGEVWWASDYLYFNDKLSPDSYYLFNEGASCVDYGGLYYLMRNIAPWSLVSAYCDRGVTFTMGFPAIGLATIGYANTILLSIIAGALVGLTSFLTMISIRNRNYIALFFAFKVVLIETHALNMGNMHNIFDYKFMFYLIAFIFISRIAFTYEKINSHVPASIPSGQAK

SEQ ID NO: 1318 - protein, 199 aa, Kosakonia cowanii
MARLTTIRLYGALGARFGRVHKLAVQTSAEAVKALCINFDGLEDYLMNAKKNGMTFAVFRGKRNIGVQDFQELAGKSDIRIAPVMEGAKKAGMFQTILGAVMVVAGIIVGVATGWTGVGLTFGAGLIMSGASMMAGGIYQMLSPQPKGLQGRDDPDNKPSYAFGGSVNTLAMGNPVAPLWGEREIGGAIISAGIVAEDI

SEQ ID NO: 1319 - protein, 378 aa, Kosakonia cowanii
MAARPRKNNVSVPNLYPLYSRKVNKVYWRYKHPTTGKFHALGTDEAEAIAIATEANTRLAEQRSRQIMAIGDKIATSKGKAITTNTWLDRYWKIQNERLETGDIRLNTHKQKAKPVALLRERVGMKLISNVNVRDIAEILEGYISDGQPRMAQVVRSVLIDVFKEAQHYGEVPPGYNPALATKQPRRRITRQRLNLEEWQKIFEIADAKHQYMGNAMLLAIVTGQRLGDVAKMKFSDIWDDHLHVVQEKTGSKVAIPLSLRLNAIDWSLRDVISRCRDYAVSTYLIHFFRSTSQSERGSRVKTNTITMHFSKARDQAGIDWGDGSPATFHEQRSLAERLYELQGLDTQKLLGHKSPKQTASYHDDRGKDWIAVSFKGA

SEQ ID NO: 1320 - protein, 116 aa, Kosakonia cowanii
MPVNYTRMKATSTRLLTENGAAYPVKRKGTVTVIGGIEHREPDKTFTAIGVRTEYRPGEIDGTVIINGDMRIVFTADTELRTGDMVDVDGKWYRIEKPNPVNPGKLLLCYRAQLRA

SEQ ID NO: 1321 - protein, 54 aa, Kosakonia cowanii
MSTQWRTGMGGITGLDYNVLPWLMKLNGVEDEATALTDIRVMESVALKIMHQGA

SEQ ID NO: 1322 - protein, 119 aa, Kosakonia cowanii
MKRMPDKDAGFWAGLIAWLYSHKTEWGYAGVAGMFSLLRSAYAQSSWSKRVLDAVSCSALAFFAAPTLQVVGGVLNWNVPDTAAQVFAVYIGYVGNDYISEKLRGWISRRTGDNSENQS

SEQ ID NO: 1323 - protein, 118 aa, Kosakonia cowanii
MSKSLKARCIRRWEVEFKGRCDSKLSPFWRKHHLRCYIRECALITADCMIENLAYNNAMHDFFAENGDNRGWSSEFSLWYDSNRREQYQKEAQSYLNEEASNEEIDEEIQNELEAWND

SEQ ID NO: 1324 - protein, 58 aa, Kosakonia cowanii
MTERGMIFGGKMVRAILNGGKKQTQRIMKKQPAKLPSTDNVLILDMYSGNHASFRNNP

SEQ ID NO: 1325 - protein, 79 aa, Kosakonia cowanii
MKKSQGQGDWYDIVRRSDGKLMGSMPLESRNLVYIKNGMFSCRPLMEDEGVFNLSSGTRFLRRLGYRLEQPSDMMISTD

SEQ ID NO: 1326 - protein, 89 aa, Kosakonia cowanii
MAKLLNLREWAAEVYSSPPSLSTLRRWVREGKIYPAPELHGKEYKLRPDAIYVNPSKKNLRLKPQHLKIPSKGTLLERLQNAEASPLRR

SEQ ID NO: 1327 - protein, 129 aa, Kosakonia cowanii
MKEKTHQINHPQVQRLNEILELKSLTKSDMARICGVSAQSVNNWFVRGTIGKSSAIKLADALGVSLEWILGKEVGEKDGLKPDEQRLLELYRQLPEEEQQNMLRIFALRLKELDELYEKYMKGRVRSQD

SEQ ID NO: 1328 - protein, 72 aa, Kosakonia cowanii
MKAIDKAITKAGTATRLAELLTVSAMTVSHWRNRYRGIVPADRVLQIYAVTGVTPHELRPDLYPNPSDGLPK

SEQ ID NO: 1329 - protein, 187 aa, Kosakonia cowanii
MQTVGFRDDSRGLPAPLRSNYQGVPRNNCKLNHIREAVKAWNRATPGSAQLHISQLVAKEWIARGGRGLLLAGSEHNTKQNFFRMINDPGPKNDKNLLQLIPVIIDVMARDNEQVARRFGLISGKTKAELIAEAMKECAEAKQAVLLNVPEHQKLKEVSEGITSLFRLMPEQTGALMTIVTSMLGAV

SEQ ID NO: 1330 - protein, 42 aa, Kosakonia cowanii
MTVLKMVKAALVRQQRLSGAITDSNCEVIMTNAHLKHQAKGA

SEQ ID NO: 1331 - protein, 229 aa, Kosakonia cowanii
MNQELFHAVQNRDGEMLARMAGSCREQAKVINSDAERMVDLLFSQLKQVFPAATQTNLRSEADERTAKQQWIATFAENGIRSREQLVAGMQKARASVSPFWPSPGQFVAWCREGKGLLGVSPADVMTEFWKWRKLVFKYPTSEQYPWPQPLLYHVCLELRRRGVDRQMNEKELLSEAGHLLAHWEKRVAEGKPIPPVRRALAAPHKDRGPTPAEMLMAEYKRRQAQGRV

SEQ ID NO: 1332 - protein, 107 aa, Kosakonia cowanii
MCNRLKPKQKAIVEFIKTNGPATPRQIRKLLGCDIREAYDRLKRLGMAGIVKNIGKPKHPEYQLVQRWQEKIKRPKPRIPAAPSAADVCRQNWQGYEIHKIFGSARA

SEQ ID NO: 1333 - protein, 114 aa, Kosakonia cowanii
MSESLNNKELIAVGHEFAKALSSDTPIIDIAKMMSRLAERLDCTTAVLRETAKQRDALAALQQQDITKVLDECSEYLDRDCIMESNGISYEVAAQRQVGAKALHDALIRKGAAL

SEQ ID NO: 1334 - protein, 198 aa, Kosakonia cowanii
MAQLQLIKHSSNILIPATPETSDFLQSKCKLGAVLVADFKQVRNPAFHRRFFALLNLGFEYWEPTGGAISSNERRLVTGYAKYLAMFGGSETTLLDAAEQYLDRIADKRTGSISVCKSFDAYRAWVIIESGHYDAIQLPDGTLRKHPRSIAFANMDETEFQQLYKAALDVLWRWILSRAFRDQREAENAAAQLLSFGG

SEQ ID NO: 1335 - protein, 66 aa, Kosakonia cowanii
MKETWFYHMECTTEQAEELLAQYRRRGVKVERSLNPDLITWTVSAQLPEGNHPPRPSRVWQSKAWG

SEQ ID NO: 1336 - protein, 203 aa, Kosakonia cowanii
MAKRLRRKCANLSCRQWFNPVRERQVVCSFECASAIGKEHTAKAREAAKQKELQRQRTEEKAGRQRRAARRRELRPIRHWVQMTQRAFNDWRREMLLGAGHGCISCGNKTAFAWHAGHYRTTAAAPQLRFNPDNIWLQCSACNVHKSGNIEAYRVALVELIGEERVLALESNNETHRYTREELDGIRAKARADLRVLKQQEAA

SEQ ID NO: 1337 - protein, 150 aa, Kosakonia cowanii
MNPINFIKNYSHIIVIGLICIALWGLNARNAQLTATNERLEKLANSKDDQINDLRSKNDGLAASVGELVTAVRQQNQVMSQVTEQRAVTAQQNRKLQNEIKQYLEADKCAQSRVPDNAADRLRAAAKAAGGVPDNKPAANQPARRADLPH

SEQ ID NO: 1338 - protein, 66 aa, Kosakonia cowanii
MTFFIVWEAYTRDWQLMQKGSRFMSTDDPDIIDVDLADYVADMAKALGIEEKYLVITSVQSLGFLN

SEQ ID NO: 1339 - protein, 80 aa, Kosakonia cowanii
MPFSTLIKTITISNAVSEDFKFEIYQNEKALFHADISRKDPLGKWEQFRNKFRFSKALDVEEVIGRCRKLVDDQFLAMKE

SEQ ID NO: 1340 - protein, 160 aa, Kosakonia cowanii
MIITDITSPAMNSYAGEGDLKAFADLRDITLPEKIAPLLIRAMDYLEGLDWAGWRSEPKQPLAWPRAGIELDGYELPDGEVPRLVVTAQCMLAVEAMDGDLLGSVREAAVKSDRVEGAVTTTYAVADGEVFIPSYPAVMALLGELAGGRGYAVNAFAERA

SEQ ID NO: 1341 - protein, 202 aa, Kosakonia cowanii
MADNQAFMVSINAFVSQAKERQEEVVRVVGIKILARLVQMSPVGNPELWAVNQTAAAYNAAVSEHNSLLRQNPDNLTKAGRLRPGRKVKDGMDLKAPPGYTGGRFRGNWQVSFDARTTDETGRVDKAGHLTMTAGNVTLGLFKVGVRDIYFCNNVPYSYRLEMGHSSQAPGGMVRITAAEFQRYFSQAVSEVKNDTGHHNGA

SEQ ID NO: 1342 - protein, 136 aa, Kosakonia cowanii
MIPDITTALESMLGLWADGEGVRVSWDNIQFDPPGDGLYLISHDMPAQPYSIDMAGGCRVYPGVYQVTVVAPAGGGKSQARVLAHRVAGLFPENQEIPGDGFTVWVTSPPAIYPGIPDGVSYSIPVSINYRADISA

SEQ ID NO: 1343 - protein, 225 aa, Kosakonia cowanii
MGFALPNGATVFVGSKLATPVAVTGVSNAAGAVFTVASGHGLAVGDVVLVSSGWALIDSLVARVTAQTTTSVTIGVINSTDTNFFPAGSGTGYLSKVAEWTEIPQITEVSQSGGDQQYTQIQFLADDRQRNLATYKAAKSQTFTVAHDSTLPIYAVLSAADRSGDTLPLRMYVPKAKETRYWSGKPSFDPQPTTAPNAVETVQPAFAIQSRDITFYKDAAPQAAA

SEQ ID NO: 1344 - protein, 103 aa, Kosakonia cowanii
MTTKFQLQPKPTFKADVTIPRAGEDDGVLTFTFRHKPVKELAALEEIEGKTAIDFLTEITESWALPDEFSRENLEMLLDNYPGAMKAIVGTYYRELTGNREKN

SEQ ID NO: 1345 - protein, 116 aa, Kosakonia cowanii
MAVETYKWPAQLGAGAIEYNQTIRASQFGDGYEQVAENGINSTAIQVPMIYVGKEALINEIRSFLLAHTVKAFIITPPGEEKGLYRVVKDSVRKNQISSNAAELTFTIKRVYGVYA

SEQ ID NO: 1346 - protein, 243 aa, Kosakonia cowanii
MNKTIMSAIRAHALEESPRECCGFVIQSGRRQRYIPVSNTHENPTEHFRIDGEFWANAEDIGTIIRVIHSHPGDGARPIPSDLDRQQCNNSGVVWGIYAPDSDEYAEIMPEAVPLIGRPFILGSHDCWGLIMDWHATQGVTLDDFRVDYPWWESQYPDNFYFDNWEQEGFIECDPAPGCMVIMQVESDKWNHAGIITEDGELLHHLYGQPSCITPYARGYFKDRTMICVRHRSLPEEIKPWRV

SEQ ID NO: 1347 - protein, 83 aa, Kosakonia cowanii
MKMINAAAVVLVSLMASGCASNTPPLCYNEAVVMKKRVAVPVFGIRKPVSTTEYLSGGSFGYQWVERSAFTDTSSCDRLPLTE

SEQ ID NO: 1348 - protein, 204 aa, Kosakonia cowanii
MTKKINDTPTRGPSDHSVRDQVVDAATEHFGHYGYEKTTVSDLAKAIGFSKAYIYKFFDSKQAIGEVICSNRLAMIMEIVNAAIADAPTAAEKIRRLFRALSESGSDLFFRDRKLYDIAAVAARDNWPSAQAHEQRLRQLIEQIIVEGREAGEFERKTPLDETADAIFMVMRPYISPVQLQYNLETAPAAAALLPSLILRSLSP

SEQ ID NO: 1349 - protein, 58 aa, Kosakonia cowanii
MNRKAFINDFISWINNNIESHLKIDDVAIKSGYSKWRLQRLFLAETGQALGQFIREKS

SEQ ID NO: 1350 - protein, 48 aa, Kosakonia cowanii
MVLTLSNHLPERFIKSIIYPPRKNIEKNLAVSIVTFFIPTESKITIIT

SEQ ID NO: 1351 - protein, 162 aa, Kosakonia cowanii
MTRIGILGVNDLTETILVELFRLDPCAHVFLSSGEHERANLLARKFPCWIQDDVQAVINEADIIIITTGTSSSENPPEKIEYRKSQLIFFLEAWPSINSQVFSPHTDKKINFTTRHVALANISPFIHLTEVQIDDYLFILKVLLVAMKPVHTLDVNFRSSSE

SEQ ID NO: 1352 - protein, 268 aa, Kosakonia cowanii
MFSKFIFLFAIIFASSINAASFDCQKATSVSENIVCSNYELNKLDEVLGKNYQLMLRATADKETISEGRRQQVLWFKEKEKCSDAQCLRSAYIQRNDEICEFILDRTTGPFECVSTSSAIQSIQKQEYDESHSKSPDQVVQEIYARHAQQVASLGFSERELSSWLYFTVQAGAPYRKFSTLGQYLAMMYELDGFKSISKVDDGEHFGFKVKVSGQPSSGFVFHLEDDEYYLTGIIQGDEIYVAPQNIQISNLFYSYGVYALGKNGAAL

SEQ ID NO: 1353 - protein, 257 aa, Kosakonia cowanii
MTALIDTAAMLAPGGKVRLVEVDASEFSGGIHRFHYSPFPHTPREIDEAQGDESKLGPKPVVFDGEVYDFWPFQLTGLALSTDQAAEPSLSVSNLDGHISALCLQFKDMVNAKVSIIDTYTVYLDAVNFPDHVNPTADPTMFTLQTFWLDTKTSEDDEVVTWALSSPADLQGLVIPTRQITSLCEWALRGQYRSGDGCTYNGTAYFDAKGNPVADPALDVCGGCLSDCRKRFGAGLAEPNAAILDFGGFPATVLFTR

SEQ ID NO: 1354 - protein, 360 aa, Kosakonia cowanii
MQRPARYDANLPRNLTFRKRDKLYSWRNPITGQVIYLGRIDRREAIAQAIEANSYLDQNYIPSSLLQRIKETPTLTMAKWLERYDIILERRELKPNTMKVRRNQIETIRKEFGTIAISAVTTKDIAEFLETYIACDKKSMAAGLRSVLLDVFREALVEGHIERNPAEPTRTPAPKVKRERLLLEAYFTIRETAAANSVWAANAFDLALVTAQRREDIAMMKFTDIREDRLLVTQEKTGNKLAIPLDLKLEAADLHLKEVIERCRVNNPSEFLLYSPVRRGGRKPGPLTPDGLTQAFSDTRDITVLKFGPYPPSFHEIRSLASRLYEKEKGEEFAQRLLGHKNLSMTKKYLDSRGAEYVRV

SEQ ID NO: 1355 - protein, 358 aa, Kosakonia cowanii
MQNTNVAVADQNAVVNSNIALFDSQYLNAISTFAQIMAQGAATVPKHLQGNQADCMAVAMQAAQWQMNPFAVAQKTHLINGVLGYEAQLVNAVISRSGVLANRFEYEWYGPWEKVVGKFHIRKGEKGEYRFPGWTMADEAGIGIIIRATLKGEDHPRELDLLLTQARTRNSTLWADDPRQQLAYLAVKRWARLFCPDVILGVYTPDELEERQEKEINPAPQQRVSVADIPAESTTNSAQESGTNIDGMADEFRDRIEAAQSVDQTKAVRVDIEAAKTTLGSALFTELKNKAVRRYYLVDARNKVEAAINSLPQPDEPDAAEQFTKAEQALAAAKRHLGDELYDQFAVTLLDMKPEYVA

SEQ ID NO: 1356 - protein, 1133 aa, Kosakonia cowanii
MEFFHLLKASQKSGKKDAVIWFTAKTAARANLQLDVELEDAGIETGRGKDYAKPIRTDMPVVGDLPEEGVIDYTWCERYALAEDGRTWNVIPGAASQSETTIAPDSAISDEYQPAAAITAPDTADVGTTSLLENRTPAVRFAVHLLGDKYLSEISQEQQIVATELAMNEANVYFQNLLQAKNVVPDMSELSLHAEWKLVQAVKDVFPQDKQHEPALLAAFISSWVKAEVSDRAQLIEDWLSSKLPAPELAGTSESGEDALASSEIVRQEARPEEVAQAQALVQAFRDRDITELHAVPTLSFRHRLLAQFITEEEYAYQIDNEQLNTVRQLEMDTDNSYVQNLLLAAENVEGMKNLRDFEFWRLTDAVKRVFPSDKATPDLSLMLQFMKAWKTTDYIDRGLLAKEWINGNRVSTIRRTDTGTNAGGGIKTDRNADYEHTLDTLDIEIACATLPMDFDIYNIPGSIHRRAKDIVAAKESPWKEWSTALRKTAGILDYSRAAIFALIREASSGITTFPDRMTGYISATLNEYKHDTPEARILAAARQIDSAAVDAGVIQCTEPLHQLVATPQPEVSNLGGGMFSIDGLLDEKANPVIITPSNEVAKQEVEIIGSVQMEETDSSKVEAGNALPAIEVANGAAAQTISVSPADIFAAATPEQTRNVAPDLDQNIDALSQDEPELPPTEPEMTEIEPVADISEPEAAAKEWPAYFEPGRYEGLPNDVYHAANGISSTQVKDARVSLMYFEARHVSKTIQKERSKVLDMGNLVHALALQPETLAAEFSIEPQIPEGALTTTATIRECIDEYNASLPPQLNADDIKALLEAHNATLPEPLPLGAALDGTAESYMALPEEFQHIEADKKQTAAAMKACIKEYNATLPAPVKTSGSRDALLEQLAIVNPDLVAQEAQKPAPLKVGGTKVDQIQALKAVRPDTVFADELLDAWRENPEGKVLVTRQQLETALAIQKALHAHPTAGKLLQHPDRAVETSYFGIDEETGLEIRVRPDLELDVDGVRIGADLKTISMWNIKQSGLRAKLHREIIDRDYHLSAGMYMETASLDQFFWIFVNKDEGYHWIAIVEASQELVELGILEYRATMRAIANAFDTGEWPAPITTDYTDELTEYDLRRLEALRAA

SEQ ID NO: 1357 - protein, 331 aa, Kosakonia cowanii
MTKHIDNDADNEPSGKAIGGKAKAAKMTPEERKEAAKKMAAAKKELASLPVAEYGSSDAPLRIGDAEIQCYVLSDGSRVLSQRGVFSGLGMSGGAADRLLNFVGGDRIKPFLNNDILPVIENPIKFRHKNGGGVAFGYPATILADICDAILAARKEGKLQKQQEHLAERAELLVRGFARVGIVALIDEATGYQKARERDALAKILEAFVAKELQPWVHTFQPDYYEQLCRLRGVPYPPQKKNFPSYFGTLTNKIVYDRLAPGLRDELKSEAAKSKKKGRLHQHLTQEIGHPKLREHLSSVVTIMKLSKDYEHFEGNLEMVHPELPPKTDIE

SEQ ID NO: 1358 - protein, 310 aa, Kosakonia cowanii
MENQKTGFIPLYRSVLKQSWAKDVYLRTLWENLLLTAARQPYTANFKGRQWPLQTGQLVTTTADLGLDLCDRNGEPTSRHAVDRMLAFFEKEGMIATAGERRKGTVITITNYALYAQKMDDLPAHNGAHNSEHFPAHNESSNGAASEGSAAHNPEHKGALKPAHHEQEVILNTNVFNDRQKKSKSLPDAAVQTPAGNKWGTAEDLQCAEWMLALRNITKPSMKKPNLTSWANDIRMMRQLDGRTHREICQLFKWAAQDSFWHKNILSPAKLRKQWDTLVLHREDGSRKTTSDAPASDAHWNSPEAWKDFI

SEQ ID NO: 1359 - protein, 267 aa, Kosakonia cowanii
MKLESSLKHFSPQGVNISDSVKGTSPDRLTGTDVMAAIGTTSSRARFGLAAFFGKAGISKTDEQIAVQALVRYAMEVAPKNVRKAAGGELGWCMQVLAQFAFAEYARSAASSSTCTTCSGTGFILRREDVIKHPGIFNADCVELVAAKIKNELVKHACTACRGKGIIPARCRCGGKGEVLDRVATKERGAPVFKTCERCSGNGFSSVPSTAAHKAIIRRLPDLHVRTWTRNWKPFLESLVRICQQEEAKAEKEFQNATSFNEEENKI

SEQ ID NO: 1360 - protein, 335 aa, Kosakonia cowanii
MAKPDWGELQQRFLSDHAATGVTPKEWCEAQGLNYATARRYIKKPAAQIAQKNAQKKVRNAQKEIDVNALVENDGLTAQQRIFVAEYLKDCNATQAAIRAKYSAKTAEQIGYQLLQKTSVAAAIDKQQKASLMRTLASADEVLAQMWQLATFDANELSQYRRGACRYCHGFGHNYQWRDMVEFEEHRLKAIEKKGKEPVDVGGYGYDHNREPNPACPRCNGDGIGQPYFADTRKLPPVSRLAYSGIKLGKNGVEITAISRERMYEAVMKRLGLADSEFAQQLQQIEIERRQLEVEKLRKELAADPEDEVPMPVAININVADARVRKDDDGDIADP

SEQ ID NO: 1361 - protein, 436 aa, Kosakonia cowanii
MTGISPTLNVPQAQFLAMPHKFKSYVAGFGSGKTWVGCGGICKGMWEHPKINQGYFAPTYPQIRDIFYPTVEEVAFDWGLKVQINESNKEVHFYAGRQYRGTTICRSMEKPATIVGFKIGNALVDELDVMPALKAQQAWRKIIARMRYKVAGLRNGIDVTTTPEGYKFVYQQFVKAVRDKPELATLYGLVQASTFDNEANLPDDYIPSLLASYPPELIKAYLRGHFTNLTSGTIYHQFDRRLNNCTDEEQPGEPLFIGMDFNVGKMAAIVHVKREGLPRAVRELVKVYDTPAMIKRIQEEFWRYEGGRYVASRQIYIYPDASGDSRKSNCASLTDIAQLREAGFSVIVNASNPPVKDRINSMNAMFCNALGERRYLVNVQRCPVYTESLEQQVWDKNGEPDKKADNDHPNDGGGYFIVKDYPIVKPAYSITMDTTF

SEQ ID NO: 1362 - protein, 468 aa, Kosakonia cowanii
MANNDITWVRPEHRAASAAWKKIRDFCKGAEAVKEPGNNYLPLLDSTDKSMRNRKRNEDYLQRAVFYAITGNTKIGLLGLAFRKDPTFSAPEKLSYLLKNADGAGTSIYQQSQLVTENVLEVARDGLYVDYAEGSGQAIILRYLAENIINWRTKRINGRDQLVLVVLRECVEQEDGYAFKDEVQYRELALEEGRFICRVWRRSADAGSAAYAVTSEYQPKPKGKDSWDEIPFTFVGAQNNDPTIDDSPLAALVEINHGHFRNSADYEDSVWFCGQVQPYMTGLDEGWRDHLEKKGVKIGSRSPLLLPREGNFGYAQAQPNMLAKEAMDSKRDYMVQLGARLIEQNAAVKTATQSSSEQTSSTSVLGICVSNVSEAYSLAIGWCAKYLGVGEQQAAYAINQEFIAKVAESGMVTAIVSAWQSGAIRDTDMIRALQKLDLINPADSPDDIIDELHNPTPTLIGGNDGNGK

SEQ ID NO: 1363 - protein, 361 aa, Kosakonia cowanii
MATVNEMLRDEAIAHTVWISRYSTGVANRMVKLLDDSDAELTARLLLAMDSLPISQFTVSRLESMLGSVRELNQQAIAGMQTSLADELLQLAGHEAGYQLSLFDSLLPQRVKERYPLQSITPEQIYAAAMAQPFQGRLLSEWADNLEADRMARVVNAVRRGYLQGDTTETIALQVRGIASKGYKDGALQLSRTNAASITKTAVNHLAATARTNFAEANGDVLKGKQWLSTLDNKTTPTCIIRDRLRYTLDNKPVGHKVPYLQGPGKIHFCCRSTETLITKSWRELGIDSNELDEDTRASMDGQVPADTTYLDWLARQSLPRQNQILGPERAALYRAGELKLGEMFTDKGEWISLARLKALS

SEQ ID NO: 1364 - protein, 256 aa, Kosakonia cowanii
MLIRNMLLKYYAPEDDGQGGGGGGTEITPEIQKLIDDQVAAQVSGLKTKNSELLGTIKQQKDNLSRFDGIDPDAVRGILQRFSDDEEAKLIAAGKIDEVLDKRTERLRADVDKQIKAANERADKAEAFSGKFRDRVLGDAIRAAASKAGALAEASDDLILRAKGTFQLNDEGEAVAVDANGDVLFGKDGKTPLSPLEWAESLKETAPHLFPRAEGTGAGGHKPGGGGSQKRSEMSASDKADYIRKHGQQAFLKLTK

SEQ ID NO: 1365 - protein, 317 aa, Kosakonia cowanii
MATTVNTDLVIYDDLAQTAFLERRQDNLEVFNASSNGAILLDNELIEGDFRKRAFYKVGGSIESRNVNSVDKVTGKKIGAGEAVSVKAPWKYGPYETTEEAFKRRGRSVDEFSEVIGVDVADATLEGYVKYGLKALTAAIGANADMVVTADIETDGKKTLTRGLRKYGDKFNRVVLFVMHSATYFDIVDEAIANKIYEEAGVVVYGGQPGTLGKPVLVTDTMDADAILGLVAGAVTVTESQAPGFRSYDINDQENLAVGYRAEGVVNVDLLGYSWDTAKGDNPDLTAIGTAGNWKKHFTSNKSTAGVLIKLESAVGE

SEQ ID NO: 1366 - protein, 1238 aa, Kosakonia cowanii
MSDIATISLRVNTAELERGNKALDDFQQTAGSAANKADDLNSVFRAGADSQKKNTQSLKEQKEELQALLNKISPVNRAMDELETLQSKLAGFRGKGLLGNEDYSRFSAVLDTTRDKLFQVMEAETAEGQERLKLAQDTQRAAAAQDSFLKSLSEQAATFRASKSDVLEYRASILGLTQEAAPLIQQIRERELAIASEAVQTRIAAQELREKQAAERQALAEASRLQSQNDNFVESLRNQAQAIGKSRAEVLELKAAQMGLLQEAGPYIAALKAQEAATAQEAANKKVSAMQSRMLRDAIAELEAAERAEASEMQRAQNIRDTFVRTLEEQATSIGKTRIELLEIKAAQLGVSQQAAPFIEKLREQDEAWRKGGISAGQYRQALRMLPAQFTDIATSIAGGMPLWMVLIQQGGQISDSFGGLGGLFQFIKEEVLGFKEATDDSSESLSENANSLAENAEHGRGMLSFLTPARLAVGGLVGVASLLAIAWYKGTQEASEFNKQLILTGNYAGKTAGQLSQLSRQIADDAGVTIGESSATLAKIVGSGRFDGNKLEVVARAAAAMEDAVGQSVDTTIANFQKLYDSPVKASVELNSQLHYLTAAEFQYIAALERRGEKEEAGQKAADSYSRAEQQRSQQVIDNLGLIDQVIRDVSDTWKAYWDAALGIGRKESTAEQLEVVRQRIKEITNQSRPGVFGMGNVGDGGAAKRELAALLQQERELGFVIKSQEGFNQKRAEFNKINQDGIDAQISFNKYLDAGTTQAEKRALAQKDLNKAIADNAKAVKATQGLPYEQRVKPLTPEQISKARAGIEKLYKDPKIPKAKGITVAAGDRAEDSAQAELLALQAQLKTLQDHRSVNDTISQQRKDLYAAESKFAVLEAAASTRQLSKQEKSLLASKNQVLQLAQQKALLGDQITAQEQLNKRMDTAQKYVTQMVEKQAGLASGATMSDRLAGRQASLSQLRSGWLNAGGSLSDNGYKQELKAANDYYAAEDKLRGDWMAGARKGWAEYLDAATNVYGSMQSVAQSALGGISDMLTNLVTTGTASFKSFAASMMKMIADVINRLLVAYTVQAAMGWISAGTSSTGSGAGQSFAVPSFRPAWNGGYIPEFDTGGYTGDGGKYQPKGVVHGGEFVFTKEATAAIGVNNLYAMMRGAQGYAEGGVVGRPPMLGLMSSSGNAAPVINTTVNVDASGNASAQSSGSGDAMGRAMAAEIQNTATLVVQKHLKPGGMIYNFTKGR

SEQ ID NO: 1367 - protein, 1260 aa, Kosakonia cowanii
METITGAKGGSQKQHTPVEQPDSAQSMARCRMLLALGEGEFAGGLDATRIFLDGTPLGNADGTMNFENVTWDFRPGTQTQTPIPGFAAVENETSIGVSLTKVAPWTRALSNIQIDAVLVRIGIPGLQQQQNNGDIVGTTVKYHVDLAVDGGAFSTVMTRTVTEKLSSLYELTHRINLPKATTGWQIRVVRDTDDSTSQLLQNKTQVQAITEVIDARLRYPHTALLYVSFNAKSFSDIPKISCKPKGRIIRIPSNYDPIARTYSGTWDGTFKWGWSNNPAWIWFDVLTEPRFGLGRRITADMLDKWELYRIAQRCDQKVPDGKGGSGTEPRFMFDVYIQSQADAWQVIKDIAAGFNGMTFWGNNMFNVVSDMPADTSKLQILNRAAVIGKPVYSSGSEKTRFSSALINFSDPDNHYQDRTTAVMFPDLVKQFKFKQTQITAIGCTRESEAQRRGGWAVYSNSLDRIITLQTGLDGYVYVPGTVFAFADERLSGRVYGGRVAAYNGGLKAVTTDRGTSAVAGDTLMIRTQGGTVESRVIQAVNGTQLVVSTPFKADPLPNAVFVIDAGQLRLQYFRVTNLTFNDEENTYSITGAEYNSSKYDAVDNNARLDTPPISLIPTGLVNQPTNIQVSSFESVRQGQRITTLIASWDAPLDKNGKPQADVISYQVQWKRGDNEWINVPETGLRNIEVSGIFEGDYLVRVRAINSGGASSLWASSLLTHLKGRVGDVPKPVGLSASEDVVFGINITWGFPADTADTLSTELQYSLATDGTNPMLLAAVPYPQKLYQQMGLKAGQEFWYRARLVDRTGNQSAYTDWVRGQSSSDVTDITEAVLAQIKDTQLFKDLIENAVESSAKVAELAEAVRENAAGLAAAAGSNKQMAEAIIGNALAIADVVVRQSAQQGANSAKFEQLREVIATETEARVTDVIRLEAKTDQNAAGITEVRQALANETEARATAVDQLTAQTEENKSSVTALTQTVTDLDSSTASRFEEISAEIAGIDGSDIRGGIQSNSIALITSTLAQVNDRTRLSVQYGDNKAGIERVDNVMADASQAVAESLRSLDASSGAGTANTTDFAKTMADFSQVSATKINTLSVTVNGQSAAITQASQAVADISGNLNAMYSIKVGVDANGLRYAAGMGIGVQNTPAGMQSQVLFLADRFAVMTQAGGTVSLPFLVQNGQTFINEAFINYASITLARVGSWYSANYVAGQTGTIMKADGTFEVNGAVSGQGRMQITNNRIISYDAQNRPAAVMGQRL

SEQ ID NO: 1368 - protein, 317 aa, Kosakonia cowanii
MQMFIAGTSFDAINAMAASYVLDVITINGTGSKTYSLSGVSLTYAIVNDFMGGQLTGATYSVSVSGLTVSWNVNNAVTLIVYGSPVAGTQSDYFGFQLFQYINGARTVKLAPNYVPLCLRQIIDVPAGARTVQTQVPAGNPVMCFHRHTGEAMDLCWWKPVTASGYHALQFPTAASNQTGCRVYVFSNILANIPDYGFFLYRAGQMVWHSNCLPLQVIPLTNGDITSATPLAVSSSVTSHIFVPQDPAYPTGYSNFMCASAGKDGAAYKVQVGKVFQSTYISNPDEGRRMRGWACGGVGYIDTRFYDQYYKNALGIT

SEQ ID NO: 1369 - protein, 419 aa, Kosakonia cowanii
MIYTTGSIAVSGNTLTGTGTNFTAAGSLIRNGCTVLALTSPAQAFQISSVDSATRLTVSPAASVPAGTKFAILLSDSLSVDGLAQDIAETFSMYQRYMGGFADVMNGSGDVTITINGQPVTVPGQKSLAKKGANADITSLNGLTTAITLAQGGTGAKTAAGARTSLGLGSMATQSSDAVNITGGSGTFTSLSSDAVTITGGTASLGTIETKAGAEQPLVIRTAPSGLGYIRFRDASENPLAYLGFGASGAQHFILASNIGVNSVTLNTTGAVTVKAGGANYAFQTNGTATGQLWQSTSDVRIKKDIKPITNAREVISAISGYTFKKRYNLYDVAEPLYTEEAGILAQELELVAPEAVSKNDFGAHDLENNPIDDLRAVNYAGITPYLIELAKLHEAEISYLKGEVAELKALVSSLAQGS

SEQ ID NO: 1370 - protein, 269 aa, Kosakonia cowanii
MSEHKVVLITGVSSGIGRAAALAFKARGCQVFGTVRDINSASPLNGIALTEMDVRDEHSVQQAIERVIAKAGRIDVLVNSAGVSLVGAVEETSVEEATRLFDTNFFGALRTTRAVLPHMRSQKSGRIVNVSSVLGFLPAPFMGIYAASKHALEGMSETLDHELRGSGVRATLVEPSFTRTKLDVNSAETAEKIAFYKDARDQTLGAILKKVGTASLPEVVAGTIVAATLGPWKMRYTPGGEATLLARLRRFAPASMVSKGLRKTFEMKE

SEQ ID NO: 1371 - protein, 1036 aa, Kosakonia cowanii
MSSGRFNLSALAVRERSVTLFLILLITVAGILSFLGLGRAEDPPFTVKQMTIISAWPGATAQEMQDQVAEPLEKRLQELKWYDRTETYTRPGLAFTMLSLQDSTPPSEVQEEFYQARKKLSDEARNLPAGVIGPMVNDEFSDVTFALFALKAKGEPQRLLVRDAESLRQRLLHVPGVKKVNIIGEQAERIFVSFSHDRLATLGISPQDIFAALNNQNVLTPAGSINTRGPQVFIRLDGAFDKLEKIRETPVVSQGRTLKLSDVATVERGYEDPATFMVRNQSEPALLLGIVMREGWNGLDLGKALDKEAASINADMPLGMTFTKVTDQSVNISSAVDEFMIKFFVALLVVMVVCFLSMGWRVGVVVAAAVPLTLAVVFVIMEASGKNFDRITLGSLILALGLLVDDAIIAIEMMVVKMEEGYDRIKASAYAWSHTAAPMLAGTLVTAVGFMPNGFAQSTAGEYTSNMFWIVGIALIASWVVAVVFTPYLGVKMLPDIKTVEGGHDAIYNTRRYNRFRQLLTRVIARKWLVAGAVVAVFTVAVLGMALVKKQFFPTSDRPEVLVEVQMPYGTSIEQTSAAVMKIEDWLRRQKEAKIVTAYIGQGSPRFYLAMAPELPDPSFAKIVVLTDSQEAREALKFRLRQAAADGLAPEARVRVTQLVFGPYSPYPVAFRVTGPDPTVLRDIADKVKTLMQASPLMRTVNTDWGSRVPTLHFTLNQDRLQAVGLTSNSVAQQLQFLLSGVPVTAVREDIRSVQVMGRAAGDIRLDPAKIADFTLVGSAGQRIPLSQVGEVEVRMEDPVLRRRDRMPTITVRGDIAESQQPPDVSTAIMKQLQPIITTLPDGYRIDEAGSIEESGKATKAMAPLFPIMIAMTLLIIILQVRSMSAMVMVFMTAPLGLVGVVPTLLLFNQPFGINALVGLIALSGILMRNTLILIGQIHHNEQEGLAPFHAVIEATVQRSRPVLLTAMAAILAFIPLTHSVFWGTLAYTLIGGTLGGTIITLVFLPAMYAIWFRIKSPDSNSSTENRSASGGLKNV

SEQ ID NO: 1372 - protein, 369 aa, Kosakonia cowanii
MFRLKPATFAVCLLPFALVACGDVSDNSDPRSLPPLVRSAAAINATHSSRAFTGVVVARIQSDLGFRVQGKILERLVDTGQAVKRGQPLMRLDPVDLSLQAQAQHQAVAAAKARARQTADDESRYRGLVTTGAVSASAYDQIKAAADTARADLSAAQAQANVAQNAMSYAVLVADDDGVVMDTLAEPGQVVSAGQPVIRLARAGQREAVVQLPETLRPSPGSTAQASLYGSDKQPVSATLRLLSDAADPLTRTFEARYVLNGPLSGAPLGSTVTIHIAQGRTSQPLLQVPLAAVFDAGKGPGVWSISGNPARVAWRPVQVVSLGDDAASVTGSLKPGEQVVALGAHLLHDGETVRLAKQSDVSVAGSQP

SEQ ID NO: 1373 - protein, 488 aa, Kosakonia cowanii
MFPLNTLAVVVGACILTGCTVGPDYYRPEVPIANHYHAQPALQQPTASESSSFSIWWEKFGDPLLSRFVSDALTQNLDLAQASARMMQAQAGLGAATAALLPSGNISGQAARAYQSVETPLGQVLSSTPDYNRYGNSYEMDLNAGWELDLFGGLRRGRQAALADYQASQAGVAATRLAVAAQTADIYITLRGLQSRLDIANKQVITQQQLLEKVQLLHSKGLASEYQVRQTEGALAQVKATVPVLNNGLDAAMNALDVMLGAPPGTHHAQLASPGAIPHTPAITSMGTPADLLRRRPDIIVAERHLAASSARIGMAVSEYYPKFSLNALLGSATAVSGDNLFTAGASQSAGVLGLRWRLFDFGRINAQIKQAKGQEAEALAAYRLSVLRAAEDVENAFSALVNRQTQAATLTSGETALASARQSSFVAFQQGTASLIDVLHNDETLLQASDARAQAQTEAARAAVAAFRALGGGWQSTLPREMANTPG

SEQ ID NO: 1374 - protein, 115 aa, Kosakonia cowanii
MNLPESVGPVPVVRTPNGYWCHPALTAFYRDRDCVPQAEYDHWLADNGLEDTLVCLDPDEDTPAAQAYARNADISYWTPPVPAGEGWFTGAIFDDEDYGPACIWLRRREVPCDAG

SEQ ID NO: 1375 - protein, 236 aa, Kosakonia cowanii
MRDKTISAILAHAAQAFPAECCGVVIQKGRVEKYVACRNLAASPEEQFELSPEDYAAAEEQGTVVAVVHSHPGDGATTQPSELDMLMCDATEVPWVIASWPEGDIRTIMPRGDRPLTGRQFVLGHADCWSLIRDYFRTEHGIALPDYSVDRHWWEEGENLYMDNWYACGFREFDGPSRPGDMVIMQVQASVPNHAGVLLEGNMLLHHLYGQLSQRMPYGGYYRDRTIKVLRYKDLM

SEQ ID NO: 1376 - protein, 236 aa, Kosakonia cowanii
MRQKTIDAILAHAAAEYPRECCGVVAQKSRVERYFPCRNLAAAPEDNFVLCPEDYAAAEDWGTVIAIAHSHPDATTQPSELDKAQCDATLLPWHIVSWPEGDLRTIQPRGELPLLERPFVLGHFDCWGLVMSYYRQTHDIELHDYRVDYPWWENNYPDNFYEECWYECGFREFDGPPKPGDMVIMQVQADKWNHAGILLEGNLLLHHLYGHLSQRVPYGGYWQERTMKILRYTSLC

SEQ ID NO: 1377 - protein, 112 aa, Kosakonia cowanii
MAVETFSWCPKVAAQADTSFRTRKAQFGDNYAQVAGDGINPVTPQWSVSFTGDEAYVLAIKAFLKRHAGWKSFIWKPPLESAGLWRSESLQIATHGNDKYTLSTTFIQAYHP

SEQ ID NO: 1378 - protein, 112 aa, Kosakonia cowanii
MAIEEFTWCPRINAQQEVTFRTRTAQFGDAYKQVSGDGLNPRSQKWTMEFTGDEAYIAAIKAFLDRHGGTRSFSWRPPLEPLGLYRCNTYTPTPLGARKYNLSATFEQAFAP

SEQ ID NO: 1379 - protein, 252 aa, Kosakonia cowanii
MSISSDVQKLEPGSRVRLIEVDGQAFGAGILRFHNETIPHTEAEITAAGGDASKLPPKSVWWQGLEYGAWPFELTGLSVSSDGQSARPTLSVSNISGTIGALCRRFQGMAKAKVIIHDTFAHYLDARNFAGGNPAANPTEERRQVYYIDRKSGSDDETVEFELSSPADLRGQLIPTRQIQPMCTWCMRGWYKTGNGCTYAGQNGWFDKDGNPVDDPSKDVCSGLLSTGCKTRFGAENEVDFGGFPGASLLRG

SEQ ID NO: 1380 - protein, 251 aa, Kosakonia cowanii
MSLNSDYQKLEPGDEVRLFEVDGTAFGTGEVLRFHSYSLAHTEAEIAAAGGNENKLPAKSVWWQGEEYKAWPCKIEGIESSTSGSSAQPKLSVANLDSSITALCLAYDDMLQAKVTIHDTLGKYLDAKNFAEGNPSSDPTQEKLKVFYIDAKSSETNEVVEFTLSSPMDLQGLMIPTRQLHSLCTWCIRNKYRTGDGCDYAGTRYFDKNNNPVSDTSLDECSGTLTACKLRFGENNELSFGGFPGTSLIRS

SEQ ID NO: 1381 - protein, 199 aa, Kosakonia cowanii
MEKRTVIKLSGSMAQRFGRTHRRVLSSASEVFRALSSTVDGFEDYLREARARGLDFVIFRDRRNISQEEFSLLGPGDELRIIPVIRGSKRAGIFQAVLGAALIAGGIALGPAGAGLIGKGVALNVALVGASMALGGVVQLLSPQVAGMRMRQDPDNKPSYAFGGPVNTTASGNPVPLLYGQREIGGAIISAGIYAEDQQ

SEQ ID NO: 1382 - protein, 200 aa, Kosakonia cowanii
MNEIMTQIELGGVLGKIFGKKHQRIISTPLEAGKALAATIKGFEQYMISSKSRGLTYAMFKDKKNIGIDDLGYPVTGEVIRIVPVIIGSKKAGLLQTILGVVIVAAAVISGPVGLAALSGAQAFSIGAIGASMALGGVIQMLSPQPTGLASKQSADNRASYAFGGVTNTTAQGYPVPLLYGRRRIGGAIISAGIYVEDQQ

SEQ ID NO: 1383 - protein, 83 aa, Kosakonia cowanii
MKIINAAAVVLVSLMASGCASNTPPLCYNGAVVMKSRVAVPVFGIRKPVTTTEYLSGGSFGYQWVERSAFTDTSSCDRLPLTE

SEQ ID NO: 1384 - protein, 204 aa, Kosakonia cowanii
MPKEMNINAVRGPSDHSVRDQVVEAATEHFGHFGYEKTTVSDLAKAIGFSKAYIYKFFDSKQAIGEVICANRLAMMMDIVNAAIADAPSASEQLRRLFNAVVQAGSDLFFHDRKLYDIAAVAARDKWPSAQAHEQRLRQLIEQIVKAGREAGEFERKTPLDEAADAIYLVMCPYVSPVQLQYNLETAPAAAVFLSSLILRSLAP

SEQ ID NO: 1385 - protein, 150 aa, Kosakonia cowanii
MNPINLIKNYSHIIVIGLICVALWGLNARNAQLTATNERLEKLANSKDDQINDLRSKNDGLAASVGELVTAVRQQNQVMSQVTEQRAVTAQQNRKLQNEIKQYLEADKCAQSRVPDNAADRLRAAAKAAGGVPDNKPAANQPAGRADLPH

SEQ ID NO: 1386 - protein, 66 aa, Kosakonia cowanii
MTFFIVWEAYTRNWQLMQKGSRFMSTDDPDIIDVDLADYVAEMAKALGIEEKYFVITSIQQICVLK

SEQ ID NO: 1387 - protein, 119 aa, Kosakonia cowanii
MKRMPDKDAGFWASLIAWLYSHKTEWGYAGVAGMFSLLRSAYAQSSWSKRVLDAVSCSALAFFAAPTLQVVGGVLNWNVPDTAAQVFAVYIGYVGNDYISEKLRGWISRRTGDNSENQS

SEQ ID NO: 1388 - protein, 89 aa, Kosakonia cowanii
MAKLLNLVEWAASVYSTPPSLSTLRRWVREGKIYPAPELHGKEYKLRPDAIYVDPSKKNLRLKPQHLKIPSKGTLLERLQNAEASPLRR

SEQ ID NO: 1389 - protein, 115 aa, Kosakonia cowanii
MNLPESVGPVPVVRTPDGYWCHPALTAFYRDRDCVPQAEYDHWLADNGLEDTLVCLDTDDDTPAAQAYARNADISYWTPPVPAGEGWFTGAIFDDEDYGPACIWLRRREVPCDAG

SEQ ID NO: 1390 - protein, 204 aa, Kosakonia cowanii
MTKQINDTPTRGPSDHSVRDQVVDAATEHFGHYGYEKTTVSDLAKAIGFSKAYIYKFFDSKQAIGEVICSNRLAMIMEIVNAAIADAPTAAEKIRRLFRALSESGSDLFFRDRKLYDIAAVAARDNWPSAQAHEQRLRQLIEQIIVEGREAGEFERKTPLDETADAIFMVMRPYISPVQLQYNLETAPAAAALLPSLILRSLSP

SEQ ID NO: 1391 - protein, 1163 aa, Kosakonia cowanii
MATLRELIIKISADSSSFQSEITRASRMGSDYYRTMQAGGRQAAAAAKESERALSDLTSGFASAGKAAAAAAAAFATGKLVQIADEWNSVNARLQQASSSADDFATSQRQLMEISQRTGTAFSDNASLFARAAASMREYGYSSEEVLKITEAVSTGLKLSGASTQESSSVITQFSQALAQGVLRGEEFNAVNEAGDRVIRALATGMGVARKDLKSMADQGKLTIDKVVPALMSQLGALQVEFATMPQTVSGSLQKVTNSFMGWVGGVNAATGATDALSGGLDGVASTLDSFTSSAVSGALSDVADNMSIITTVAGALVGVGLAKYLGGIVTSATSATGALISAAKSEVALAVAQDRAAQSAVAASRADVYRAQQALQRAKGADIQAAQQEKVAAAEAKVTAAQARLTTALAGGTATEKVRARAALERAQAGLAAAKNADVQAVAERRLAQAEAARDRNLANRVSTQSNLNSVTAVGSRLMSSALGIIGGIPGLVMLGAGAWYAAYQNQEQARRSAQEYGRTIDEVSQKIKQMSLPEASDNADKSKKALDEQNRLIDEQKSKVESLKKQIAGSQYLISNPGPMTKGGFMINHLTSLNTVTDELSTATGQLSVEQERLAQMQGKAASIQKILEDIERRRNDGIREQAWRQNAAYQSLLMMNGQHEKFNQLLGLGNQLLMARQGMTLAPLRVPQAEASQAQTEALEKSRRDLALSRLKGEAKERARLGYAADELGLTADPQFQTNRLEYINNGLEEWRNNEANKKQPKGPKTDEEKAADAYKRMIKQQKEQIALQGQSTELARVKYQVVEGELSTLDKAQKAELMRNAALIDRVKLREQLRNYEANLADSNASARAANDAQLIGYGQGTRFRERMQEQFNIRKEFEQKNTDLLRQRQAGDIDETFYQQGLALNKRYLEERLRDQHGYYTASDAQRGDWLTGMSEGYANWVDEATDYAGMAADGMKQAMGGAVTTITDMLNGNLDSWKDWGMNVLKIIETVLVNMMVANAASSLGSLFSFGASSAATASSGTAIQSAASNFTFNAKGGVYDSPSLSAYSGGVYQTPQLFAFAKGAGVFGEAGPEAIMPLTRAADGSLGVRAVGAPQFSGGGPSVSFGDININGGAQSTAGQGAAATAGRQLKDAIVTVINEQASMPGSPLWRLLKGA

SEQ ID NO: 1392 - protein, 1171 aa, Kosakonia cowanii
MATLRELIIKISANSQSFQTEIARASRMGQDYYRVMQNGGRQAAAAARESERALSDLTSGFASAGRAAAAATAAFATGKIVQIADEWTSVNARLRQASASSDDFANSQRRLMSISQATGTAFTDNANLFSRAAASMREFGYSSDEVLKVTEAVSTGLKLSGASTAEAGSVINQFSQALAQGVLRGEEFNTVNESGDRVIRALAAGMGVARKDLKSMADQGKLTIDVVVPAIISQLGTLQGEFAAMPQTVSGSVEKVANSFMAWVGGISQATGATDMLSGGLDGLAATLDSLTSSAVTGALNDVADNMATITTVAGALVGVGLAKYLGGIVTSATGATTSLIAAAKSEVALAVAQDRAAQSSVAAARADVYRAQQALQRAKSADVQAAQQERVAAAEAKVTAAQTRLTAAQASGTATEKVKARSALERAQAALVAAKSTDAQAVAERRLAAAQTGLNNNIANRVTAQNNLNGVTSVGTRLLGGAMGLIGGIPGLVMLGAGAWYAMYQNQEQARQSAQEYAKTIDEVSRKTRAMTLPEAEDNRGKTVQALVEQNRLIEEQEKAIAAVKRQLDDLNKTRGQPGMTGDNDLNIVKAMGLLTDQLTVEEDKLNQMREKSRGIQQALEAIERRRNDLIREHAWRQNAQYQSLLMMNGQYEDFNRLLGLGNQLLASRSQLIKAPFAIPQAPVSDNDKQALLQKQQSAELAGLTGLDKINRQVDFELQKMGKTGPENSKFAAGWRQAAIDEYNKSQNLAAAQKAQAEATRDAGKAQREAAQTAEQYSRKIADLSVAIEVQKVRAKEGEQAAELYASANQTGAKWTEEQRTAIRAQSAELARLTQLADDHVRKIREQADALKDLREASRKFSDEAEFAVKTAGMGDRQKQRYEETQQVERVYSKTDQSAQAFHEKEMALASLDKKYREIAASESNWRNGVSRGYASWFDEMTNIAGTVSDGVKSSLDGAFSNVTSMLEGNKVSWKSWGISVLQIIEKVALQMAVVSAMGSVSSSSGLIGSLVGGVTSFFSGGGAGASPAGQSFAVPSFTPNALGGVYDSPSLSTYSNGIYNSPQFFAFAQGAGVFAEAGPEAIMPLTRASDGSLGVRAVGSGVNNVSTAAGAAPQVNVYITDSGNKSTATPGYEQLGREAGAFIDRRYRELIGRDLAPGGNIWNLAKGNR

SEQ ID NO: 1393 - protein, 1170 aa, Kosakonia cowanii
MPPAGGFFYGRDMTNTAIKGRKGGGTKTRTPVEAPDSIQSIARAKILVALGEGEFAGGLDGRSIFLGDASSYTPLQNADGSYNFNNVKYEFRSGTQDQSYIQGFPGVENELQVAYELKAAVPYVRSVSNTQLSALRIRLGWPSLLNQKDNGDKVGTRVEYAIDLSVDGGAYETVVDGAVDDKTTTLYERSHRIDLPKATTGWQVRVRRITPDSTTVNIVDSMRVEAVTEIIDAKLRYPNTALLYIEFDAKQFPNGIPQVVCNPKGRIIRVPDTYDPDTRTYSGTWEGGFKWAWTDNPAWIYYDIVLNERFGLGQRIDATQIDKWELYRIAQYCDQPVPDGKGGSGTEPRFRCNVYIQERNDAWTVLRDLAGIFRGMTYWGDNKLYVLADMPRDLWHIYNHASVVDGKFTFADPSETTRNTAALVNWSDPANHYKDTPEVVYDNDLAMRFDYSQLEMTAIGCTRQSEANRRGRWALLTNGIGEVVTFSTGMDVPPVGEVIGVAANELAGRVIGGRVSAVSGRNITLDRAADVSAGNRLFINLPSGVAQTRTVQAVNGNIVTVTTTYSETPEAECCWGVDADDLFIALFRVTGTRDNDDGTFEVTGATYSPDIYAAVDTGARLDERPVSVIPPGVQAPPENIVIDSYSTVSQNIAITTMRVAWDSVKGAIAYEAEWRRDSGNWVSVPRTSSLGFEVPGIYAGRYLVRVRAVNASDVSSIWATSAEVTLTGKVGNPPKPVGFTASETVVFGIELNWGFPANTDDTLKTEIQYSLTGTDDDAMLLADVPYPLRKYQQMGLRAGQVFWYRAQLVDRTGNESGYTDWIRGQSSSDVTDITEAVLAQIKDTDLFKDLIENAVESSQAVADLAEAVKQNADDLAAAAGANRQTAEAIIGNALAIADVVVRQSAQQGANSARFEQLREVIATETEARVTDVIRLEAKTDQNAAGITEVRQALANETEARATAVDQLTAQTEENKASVTALTQTVTDLDSSTASRFEEISAEIAGIDGSDIRGGIQSNSIALITSTLAQVSQSTRMSVQYGANAAGIQRVDTVMADASQAVAESLRTLDASAGDGTANVTDFAKTMADFSQVSATKINSLSVTVNGQQAAIVQNAQVSADINNNLNAMYSIKVGVDANGRQYAAGMGIGVQNSPSGMQSQILFLADRFAV

SEQ ID NO: 1394 - protein, 1157 aa, Kosakonia cowanii
MAHATVIRGSKGGGSKSRTPTEQPDDLQSVAKAKILIALGEGEFSGQLTGKDIYLDGTAIENADGTQNFSGVTWEFRPGTQAQNYIQGIPGTENEINVGTQVSSAVAWTRTFTNTQLSAVRLRLKWPSLFKQEDDGDLVGHSVNYAIDLQTDGGTWQTLLNTSVTGKTTSGYERSHRIDLPQAGSTWTIRLRKITPDANSAKIGDTMTLLSFTEVIDAKLRYPNTALLYIEFDSSQFNGSIPQISCEPRGRVIRVPDTYDPETRAYNGIWQGAFKWAWTDNPAWIFYDLVVTDRFGLGQRLTAANIDKWTLYQIAQYCDQQVPDGKGGSGTEPRYTCNVYIQDRNEAYTVLRDFAAIFRGMTYWGGDQIVALADMPRDVDYSYTRANVVGGRFAYSGSTTKSRYTTALVSWSDPGNAYADAMEPVFEQALVARYGFNQLELTAIGCTRQSEANRKGRWGILTNNKDRVVSFDVGLDGNIPQPGYIIAVADEMLSGKVMGGRISAVNGRVITLDRKPDAIAGGRLILNLPSGASQIRTIQSVNGNQVTVTTAYSETPEPEAVWVVESDELYAQQYRVVSVSDNDDGTFSISGAWHDPDKYSRIDTGAVIDQRPVSVIPPGTQTPPANIVISSFSVVQQNISVETMRVSWDQAQNAIAYEAQWRRNDGNWVNVPRSSTTSFDVPGIYAGSYLVRVRAINAAEISSGWGYSEEKTLTGKVGNPPKPVGFTASETVVFGVELNWGFPANTDDTLKTEIQYSLTGTEDDAMLLADVPYPLRKYQQMGLKAGQIFWYRAQLVDRTGNESGYTDWVRGQSSSDVTDITEAVLAQIKDTDLFKDLIENAVDSSAKVAELAEAVKQNADGLAAAAGANRQTAEAIIGNALAIADVVVRQSAQQGANSARFEQLREVIATETEARVTDVIRLEAKTEQNAAGITEVRQALATEEEARATAVDELTARTDKNAANVTVLTQTVTDLDSSTASRFEEISAEIAGIDGSDIRGGIQSNSIALITNTLAQVSQSTRMSVQYGANAAGIQRVANVMADASQAVAESLRTLDASAGGGTANATDFAKTMADFSQVSATRINSLSVTVNGQQAAIVQNAQVSADINNNLNAMYSIKVGVDANGRQYAAGMGIGVQNSPSGMQSQILFLADRFAV

SEQ ID NO: 1395 - protein, 381 aa, Kosakonia cowanii
MAARPRSHKISVPNLYCKLDKRTGKIYWQYKHPLSGRFHSLGTDEAEAKQVATEANMIIAEQRTRQILSVNDRLARMKGKRTDITVTEWLDKYMAIQEERLKHNELRPNSFKQKNKPVRLFREHCGLQHLKDITTLDIAEITDAIKAEGHNRMAQVVRLVLIDVFKEAQHSGHVPPGYNPAQATKQPRNKVTRQRLSLDEWKKIYTSAEQQEPYLQCGMLLALITGQRLGDICNMQFKDIWDDMLHVEQEKTGSRLAIPLDLKCDVLGLTLRDVISKCRDAVISKYLVHFRHTSAQATRGDKVSTSSLTTTFRKARDKSGLNWDKGTAPTFHEQRSLSERLYREQGVDTQKLLGHKTQKMTERYNDDRGKDWVVVSAKTGS

SEQ ID NO: 1396 - protein, 372 aa, Kosakonia cowanii
MAARPRKNNVSVPNLYPLYSRKVNKVYWRYKHPITGKFHALGTDEAEAIAIATEANTRLAEQRSRQIMAISDKIATSKGKAITANTWLDRYWKIQGERLDSGDIKLNTYKQKAKPVALLRERVGMKLISAVDVRDIAEILEAYISDGQPRMAQVIRSVLIDVFKEAQHYGEVPPGYNPALATKQPRRRITRQRLNLEEWQKIFDIADANHKYMGNAMLLALVTGQRLGDISNMKFSDIWDDHLHVIQEKTGSKIAIPLSLRLHAINWSLRELVARCRDYAVSTYLVHFFRATSQAERGAQVKANTLTMNFSKARDKANIGWGMELQQHSTSRDLCLNVFTKCKRLTPRHYWAINRNSKLIAMTMIEEKTGRN

SEQ ID NO: 1397 - protein, 369 aa, Kosakonia cowanii
MLRPNPATLAICLLPLAIVACGDNGNSDDPRTQPPLVRTAPVMIAVDNARAFTGTVVARIQSDLGFRVPGKVLERLVDTGQTVTRGQPLMRLDPADLSLQAVSAAQAVSAAQARVRQAASDEARYRSLVTTGAVSASAYDQVKAAAETARADLKAAQAQASVAQNAMHYAVLLADGDGVVMATLAEPGQVVSAGQAVVRLARSGQREAIVQLPETLRPSLGSRAQATLYGRAGQALPATLRLLSDAADPLTRTFEARYVLQGALASAPLGATVTLNITEGLSPKPLLQVPLAAVYDAGKGPGVWEVSGKPARVSWQPVEVVSITDDAARVMGNLQPGEPVVALGAHLLHEGEAVRQAKQSDSEIAGSRP

SEQ ID NO: 1398 - protein, 1028 aa, Kosakonia cowanii
MSGGGFNLSAIAVRERAITLFLIILITVAGSVSFFKLGRAEDPPFTVKQMTIISAWPGATAQEMQDQVAEPLEKWLQELQWYDRTETYTRPGLAFTMLSLQDSTPPSQVQEAFYQARKKVGDEAKNLPAGVIGPLVNDEFSDVTFALFALKAKGEPQRLLVRDAESLRQRLLHVPGIKKVNIIGEQAERIFISFSHDRLATLGISAQDIFAALNDQNVLTPAGSIDTRGPQVFIRLDGAFDTLEKIRQTPMVAQGRTLKLADVATVERGYEDPATFLVRNQGEPALLLGVVMREGWNGLALGEALDKEAASINAGMPLGMSLTKVTDQSVNISSAVNEFMIKFFVALLVVMVVCFLSMGWRVGVVVAAAVPLTLAVVFVIMEATGKNFDRITLGSLILALGLLVDDAIIAIEMMVVKMEEGYDRIKASAYAWSHTAAPMLAGTLVTAIGFMPNGFAHSTAGEYTSNMFWIVGIALIASWVVAVVFTPYLGVKMLPAIRPIEGGHAAIYNTRRYNQFRGLLARVIAAKWLVAGSVVVLFTVAILGMGLVKKQFFPTSDRPEVLVEVQMPYATSIAQTSATTAKIEAWLRQQKEAEIVTSYIGQGSPRFYLAMAPELPDPSFAKIVVRTGSQQAREALKFRLRHAVADGLAPEARVRVTQLVFGPYSPYPVAFRVMGPDPQVLRDIADKVKTVMQASPMMRTVNTDWGARVPTLHFTLDQDRLQAVGLTSSAAARQLQFLLTGVPITSVRENIRAVEVIGRAAGDIRLDPGKIAGFTLVGSAGQRIPLSQVGEVEVRMEEPLLRRRDRVPTITVRGDVAESLQPPDVSTAMMQQLQPVIAALPDGYQIEQAGSIEESGKATKAMAPLFPIMIAMTLLIIILQVRSLSAMVMVFMTAPLGLVGVVPTLLLFHQPFGINALVGLIALSGILMRNTLILIGQIHYNEREGLAPFDAVIEATVQRARPVLLTALAAILAFIPLTHSVFWGTLAYTLIGGTLGGTIITLVFLPAMYAIWYRINRPDPHEEKRAVG

SEQ ID NO: 1399 - protein, 317 aa, Kosakonia cowanii
MATTVNNDLVIYDDLAQTAFLERRQDNLEVFNTSSNGAILLDNELIEGDFRKRAFYKVGGSIESRDVSSTGKVNGKKIGAGEAVSVKAPWKYGPYETTEEAFKRRGRTVDEFSEVIGVDVADATLEGYVKYGLKALTAAIGANTDMVVTADIETDGKKTLTRGLRKYGDKFNRVVLFVMHSATYFDIVDEAIASKIYEEAGVVVYGGQPGTLGKPVLVTDTMDAAAILGLVAGAVTVTESQAPGFRSYDINDQENLAVGYRAEGTVNVELLGYSWDTAKGENPDLTAIGTAGNWKKHFTSNKSTAGVLIKLGAASGE

SEQ ID NO: 1400 - protein, 83 aa, Kosakonia cowanii
MKMINAAAVVLVSLMASGCASNTPPRCYNEAVVMKNRVSVPVFGIRKPVSTTEYLSGGSFGYQWIERSAFTDTSACDRLPVTE

SEQ ID NO: 1401 - protein, 179 aa, Kosakonia cowanii
MFCREYLIDFNATQAAIRAGYSVKIARASGCENLTKPDIQNRIAELKAERNEQVNVNASYVLKRLIEIDQMDVLNIMTNDMSIKPVSEWLASWRRYMSGFDLADMFEGRGEDREMVGILKKIKWSDNIKNLGMHFDPLGIKSTEGVDICWVEEAQSVSTDSRDILIPTFRKGGGNFDVI

SEQ ID NO: 1402 - protein, 206 aa, Kosakonia cowanii
MIYTTGSIAVSGNTLTGTGTNFTQAGSLIRSGCTVLALTSPAQAFQITSINSATSLTVTPAASPAVTAGTSFAILLSDSLSVDGLAQDIAETLTMYQRYMGGFADVMNGAGDVTITINGQPVTVPGQKSLAKKGANSDITSLSGLTTALSIAQGGTGAKDAAGARAAFDLDNLYLRGDRNLADVKSKKTARDNLGVNASPNMWYVW

SEQ ID NO: 1403 - protein, 252 aa, Kosakonia cowanii
MNLESLPKFYSPKSPKLNDQTPATGGVALTITDVMAAQGMVQSKASLGFNLFLAKMGIQDPAPAIDGLMRYALALKNPVLGKLSEKARGEVLPVLVQFAYADYSRSAASKSTCPHCEGKGVVREMQDVVKHPGVNGVEATVKYEAVEVMCQHCAGKGEVGTACRGCKGKGTVLDEKRTKLLGAPVRKVCGRCNGYRFSRLPTTLARARIEKIIPDLTSYQWYSGYGDVIALLVTKCWQEETFAESQLRRVTR

SEQ ID NO: 1404 - protein, 252 aa, Kosakonia cowanii
MNLESLPKFYSPKSPKLNDQTPATGGVALTITDVMAAQGMVQSKASLGFNLFLAKMGIQDPAPAIDGLMQYALALKNPVLGKLSEKARGEVLPVLVQFAYADYSRSAASKSTCTHCEGKGVVREMQDVVKHPGVNGVKAMVKHEAVEVMCQHCAGKGEVGTACRGCKGKGTVLDEKRTKLHGAPVRKVCGRCNGNCFSRLPTTLARARIEKIIPDLTSYQWYSGYGDVIALLVTKCWQEEAFAEMQLRKVTR

SEQ ID NO: 1405 - protein, 168 aa, Kosakonia cowanii
MRMTAKELIADARVTAPTLPPAAAKLMTAMADRLDLQFVVLCESRNEAKQLAGENALMKSAIKTHSESVHFCVGCGKDDPCSNDDVCYALEETPATDAFLASLRAEGVEMAFEAAKPEVAKEFQRETFDQCVTAAVKYPQSDVAGKVEMVAWLEWYAAQLRSKSEVQS

SEQ ID NO: 1406 - protein, 112 aa, Kosakonia cowanii
MAVETFSWCPKVAAQADTSFRIRKAQFGDNYAQVAGDGINPVTPQWSVSFTGDEAYVQAIKAFLKRHAGWKSFIWKPPLEPAGLWRSESLQIATHGNDKYTLSTTFIQAYHP

SEQ ID NO: 1407 - protein, 317 aa, Kosakonia cowanii
MQMFIAGTSFDAINAMAASYVLDVITITGTGSKTYSLSGVELTYAIVNDFMGGQLTGATYSVSVSGLTVSWNVNNAVTLIVYGSPVAGTQSDYFGFQLFQYLNGMRTVKLAPNYVPLCLREIIDVPAGARTVQTQVPAGNPVMCFHRHTGAAMDICWWKPATVSGYHALQFPTDGSNQTGCRVYVFSNILANTPDYGFYLYRDGQMVWHSNCLPLQVIPLTNGDITSDTPLAVSSSVTAHIFVPQDPAYPTGYSNFMCASAGNDGTRYKVQVGKVFQSTFISSPDEGRRMRGWACGGVGYIETQFYDQYYRYALGLA

SEQ ID NO: 1408 - protein, 471 aa, Kosakonia cowanii
MIYTTGSIAVSGNTLTGTGTNFTAAGSLIRNGCTVLALTSPVQAFQITAINSATSLTVTPAASPAVPAGTKFAILLSDSLSVDGLAQDIAETFTMYQRYMGGFADVMNGASDVTITINGQAVTVPGQMSLAKKGANSDITSLSGLTSALSVEQGGTGAKNKADARLALSAASSGANSDITSLSGLTTALSIAQGGTGATSVSGARAALGIGAAASLGDALAAGAVLKREPGNVNTTLNNPTAIFNWLRSVGFGSYQFTAAQAGAIIRYYPTFYFNAGNLHALLQSNYSTGELISWGAVDNGGSWSFAQNILYGTANTTRATDGTIRAASPIVRIVKSKEYCTRPDIDELDFKWCGAGVANAEAEGVTVERPSTGVYLLKGSDGLARSGWQMSPPRDPQGSGDMGIVEAEQGEDGSLIIRLYKRRYVMTDDGDIEVAKGAPIDVPPTSWIDIRLDMPETSIWNQRNAASQKQ

SEQ ID NO: 1409 - protein, 1029 aa, Kosakonia cowanii
MREYGYSSEEVLKITEAVSTGLKLSGASTQESSSVITQFSQALAQGVLRGEEFNAVNEAGDRVIRALATGMGVARKDLKSMADQGKLTIDKVVPALMSQLGALQGEFATMPQTVSGSLQKVTNSFMGWVGGVNAATGATDALSGGLDGVAQTLDSFTSSAVSGALSDVADNMSTITTVAGALVGVGLAKYLGGIVTSATSATGALISAAKSEVALAVAQDKAAQSAVAASRADVYRAQQALQRAKGADVQAAQQEKVAAAEARVTAAQARLTTALAGGTATEKVRARAALERAQAGLAAAKNADVQAVAERRLAQAEAARDRNLANRVSTQSNLNSVTAVGSRLMNSALGIIGGYPGLLMLVAGGWYAAYQNQEQARRAAVEYGRTIDEVSKKTREMSLPEASDNGEKAKKSLDEQNRLIDEQKSKIESLKVQIAGSQYLINNPGPTTKGGFMINHLTSMKTVTDELSTATEQLSVEQERLSQMQEKAASIQQALEGFQYRRVSLIREEAAHQNAAYQSLLMMNGQHQRFNQLLGLGNQLLMARQGMTLAPLRVPQAEATQKQTEALEKSRRELALSRLKGEAKERARLGYAADELGFVTTDPRYQTNRLEFINNGLEEWRNNEANKKQPKGPKTDEEKAADAYKRMIKQQKEQIALQGQSTELARVKYQVVEGELSTLDKAQKAELMRNAALIDQVKLREQLRNYEANLADSNASARAANDAQLIGYGQGTRFRERMQEQFNIRKEFEQKNTDLLRQRQAGDIDETFYQQGLALNKRYLEERLRDQEGYYTASDAQRGDWLTGMSEGYANWVDEATDYAGMAADGMKQAMGGAVTTITDMLNGNLDSWKDWGMNVLKIIETVLVNMMVANAASSLGSLFSFGASSAATASSGTAIQSAASNFTFNAAGGVYDSPSLSAYSNGIYQTPQLFAFAKGAGVFGEAGPEAIMPLTRAPNGDLAVRAVGMPQFSGGGPSVSFGDINIQGGAQSTAGQGAAASAGRQLKDAIVTVINEQASMPGSPLWRLLKGA

SEQ ID NO: 1410 - protein, 58 aa, Kosakonia cowanii
MNRKAFINDFILWINNNIESHLKIDDVAIKSGYSKWRLQRLFLAETGQTPGQFIREKS

SEQ ID NO: 1411 - protein, 162 aa, Kosakonia cowanii
MTRIGILGVNDLTETILVELFRLDPCAHVFLSSGEHERANLLARKFPCWIQDDVQAVINEADIIIITTGTYSSENPPEKIEYRKSQLIFFLEAWPSINSQVFSPYTDKKINFTTRHVALANISPFIHLTEIQIDDYLFILKVLLVAMKPVHTLDVNFRSSSE

SEQ ID NO: 1412 - protein, 115 aa, Kosakonia cowanii
MNLPESVGPVPVVRTPDGYWCHPALTVFYRDRDCVPQAEYDHWLVSNGLEDTLVCLDTDDDTPAAQAYARNADISYWTPPVPAGEGWFTGAIFDDEGYGPACIWLRRREVPCDAG

SEQ ID NO: 1413 - protein, 204 aa, Kosakonia cowanii
MTKQINDTPTRGPSDHSVRDQVVDAATEHFGHYGYEKTTVSDLAKAIGFSKAYIYKFFDSKQAIGEVICSNRLAMIMEIVNAAIADAPTAAEKIRRLFRALSESGSDLFFRDRKLYDIAAVAARDNWPSAQAHEQRLRQLIEQIIVEGREAGEFERKTPLDETADAIFMVMRPYISPVQLQYNLETAPAAAVLLPSLILRSLSP

SEQ ID NO: 1414 - protein, 488 aa, Kosakonia cowanii
MFPLNTLAVVVGACILTGCAVGPDYYRPEVPIAKHYHAQQALQQPTTSESANFSIWWENFGDPLLSRFVSDALTQNLDLAQASARMMQAQAGLGAATAALLPSGNISGQAARTYQSVETPLGQVLSSTPDYNRYGNSYEMDLNAGWEIDLFGGLRRGRQAALADYQASQAGVAATRLAVAAQTADIYITLRGLQSRLDIANKQVITQQQLLEKVQLLYSKGLASEYQVRQTEGALAQVKATVPVLNNGLDAAMNALDVMLGAPPGTHHAQLASPGAIPHTPAITSMGTPADLLRRRPDIIVAERHLAASSARIGVAVSEYYPKFSLNALLGSATAVSGDNLFTAGASQSAGVLGLRWRLFDFGRINAQIKQAKGQEAEALAAYRLSVLRAAEDVENAFSALVNRQTQAATLTSGETALASARQSSFVAFQQGTASLIDVLHNDETLLQASDARAQAQTEAAHAAVAAFRALGGGWQSTLSEEIANTPG

SEQ ID NO: 1415 - protein, 369 aa, Kosakonia cowanii
MFRLKPATFAVCLLPFALVACGDASDNSDPRSLPPLVRSAAAINATHSSRAFTGVVVARIQSDLGFRVQGKILERLVDTGQAVKRGQPLMRLDPVDLSLQAQAQHQAVAAAKARARQTADDESRYRGLVTTGAVSASAYDQIKAAADTARADLSAAQAQANVAQNAMSYAVLVADDDGVVMDTLAEPGQVVSAGQPVIRLARAGQREAVVQLPETLRPSPGSTAQASLYGSDKQPVSATLRLLSDAADPLTRTFEARYVLNGPLSGAPLGSTVTIHIAQGRTSQPLLQVPLAAVFDAGKGPGVWSISGNPARVAWRPVQVVSLGDDAASVTGSLKPGEQVVALGAHLLHDGETVRLAKQSDVSVAGSQP

SEQ ID NO: 1416 - protein, 1036 aa, Kosakonia cowanii
MSSGRFNLSALAVRERSVTLFLILLITVAGILSFLGLGRAEDPPFTVKQMTIISAWPGATAQEMQDQVAEPLEKRLQELKWYDRTETYTRPGLAFTMLSLQDSTPPSEVQEEFYQARKKLSDESRNLPAGVIGPMVNDEFSDVTFALFALKAKGEPQRLLVRDAESLRQRLLHVPGVKKVNIIGEQAERIFVSFSHDRLATLGISPQDIFAALNNQNVLTPAGSINTRGPQVFIRLDGAFDKLEKIRETPVVSQGRTLKLSDVATVERGYEDPATFMVRNQSEPALLLGIVMREGWNGLDLGKALDKEAASINADMPLGMTFTKVTDQSVNISSAVDEFMIKFFVALLVVMVVCFLSMGWRVGVVVAAAVPLTLAVVFVIMEASGKNFDRITLGSLILALGLLVDDAIIAIEMMVVKMEEGYDRIKASAYAWSHTAAPMLAGTLVTAVGFMPNGFAQSTAGEYTSNMFWIVGIALIASWVVAVVFTPYLGVKMLPDIKTVEGGHDAIYNTRRYNRFRQLLTRVIARKWLVAGSVVAVFTVAVLGMALVKKQFFPTSDRPEVLVEVQMPYGTSIEQTSAAVTKIEDWLRHQKEAKIVTAYIGQGSPRFYLAMAPELPDPSFAKIVVLTDSQEAREALKFRLRQAAADGLAPEARVRVTQLVFGPYSPYPVAFRVTGPDPTVLRDIADKVKTLMQASPLMRTVNTDWGSRVPTLHFNLNQDRLQAVGLTSNAVAQQLQFLLSGVPVTAVREDIRSVQVMGRAAGDIRLDPAKIADFTLVGSAGQRIPLSQAGEVEVRMEDPVLRRRDRMPTITVRGDIAESRQPPDVSTAIMKQLQPIITTLPDGYRIDEAGSIEESGKATKAMVPLFPIMIAMTLLIIILQVRSMSAMVMVFMTAPLGLVGVVPTLLLFNQPFGINALVGLIALSGILMRNTLILIGQIHHNEQEGLAPFHAVIEATVQRSRPVLLTAMAAILAFIPLTHSVFWGTLAYTLIGGTLGGTIITLVFLPAMYAIWFRIKRPDSTSSTEKHFSSEGLKNV

SEQ ID NO: 1417 - protein, 112 aa, Kosakonia cowanii
MAVETFSWCPKVAAQADTSFRIRKAQFGDNYAQVAGDGINPVTPQWSVSFTGDEAYVQAIKAFLKRHAGWKSFIWKPPLEPAGLWRSESLQIATHGADLYTLSTTFIQAYHP

SEQ ID NO: 1418 - protein, 205 aa, Kosakonia cowanii
MRMNAKELIAEARVTAPTLPPAAAKLMTAMADRLDLQFVVLCESRNEAKQLAAENAALKSGASYFSYGSEHYFEYHKTAEEAVEAAEAAIDDYRGDACDGWSEEVDSICWGVIMQSSTKVGERPRNEDDRCDPAIDTVCDYALLPNIETPATDAYAASLRAEGVEMLRQHPAIQLCSLTHVCDEVVAQLRSKSNEAVKSIAGESQ

SEQ ID NO: 1419 - protein, 236 aa, Kosakonia cowanii
MRDKTISAILAHAAQAFPAECCGVVIQKGRVEKYVACRNLAASPEEQFELSPEDYAAAEEQGTVVAVVHCHPGDGATTQPSELDMLMCDATEVPWVIASWPEGDIRTIMPRGDRPLTGRQFVLGHADCWSLIRDYFRTEHGIALPDYSVDRHWWEEGENLYMDNWYACGFREFDGPSRPGDMVIMQVQASVPNHAGVLLEGNMLLHHLYGQLSQRIPYGGYYRDRTIKVLRYKDLM

SEQ ID NO: 1420 - protein, 252 aa, Kosakonia cowanii
MNISSDVQKLEPGSRVRLVEVDGEAFGAGILRFHNETIPHTEAEIIAAGGDASKLPPKSVWWQGLEYGAWPFELTGLSVSSDGQSARPTLTVANISGTIGALCRRFQGMAKAKVIIHETFAHYLDARNFSGGNPAANPNEERKQVYYIDRKSSSDDETVEFELSSPADLRGQLIPTRQIQPMCTWCMRGWYKTGNGCTYAGQNGFFDKDGNPVDDPSQDVCSGLLSTGCKPRFGADNELDYGGFPGASLLRG

SEQ ID NO: 1421 - protein, 199 aa, Kosakonia cowanii
MEKRTVIKLSGSMAQRFGRMHCRVLSSASEVFRALSSTVDGFEDYLREARARGLDFVIFRDRRNISQEEFSLLGPGDELRIIPLIRGSKRAGIFQAVLGVALIAGGIALGPAGAGLIGKGVALNVALVGASMALGGVVQLLSPQVAGMRMRQDPDNKPSYAFGGPVNTTASGNPVSLLYGQREIGGAIISAGIYAEDQQ

SEQ ID NO: 1422 - protein, 252 aa, Kosakonia cowanii
MNLESLPKFYSPKSPKLNDQTPATGGVALTITDVMAAQGMVQSKASLGFNLFLAKMGIHDPAPAIDGLMQYALALKNPVLGKLSEKARGEVLPVLVQFAYADYSRSAASKSTCPHCEGKGVVREMQDVVKHPGVNGVEATVKHEAVEVMCQHCAGKGEVGTACRGCKGKGTVLDEKRTKLHVAPVRKVCGRCNGNRFSRLPTTVARARIEKIIPDLTSYQWYSGYGDVIALLVTKCWQEEAFAEAQLRKVTR

SEQ ID NO: 1423 - protein, 487 aa, Kosakonia cowanii
MIYTTGSIVVSGNTLTGTGTNFTAAGSLIRNGCTVLALTSPAQAFQITSVDSATGLTVTPAASPAVPAGTKFAILLSDSLSVDGLAQDIAETFSMYQRYMGGFADVMSSNGDVTITINGQPVTVPGQQSLAKKGANSDITSLNGMTTALSIQQGGTGGKTAAEARNKIGAASSGNNSDITSITGLTTALGIQQGGTGGKTAAEARTNLGLSDVATKTAGTAEGSVMLVGAMGTPTGGYKFYKTEGAIAPTLNWNDITLPGLFPNLIDASNSANSPTASGYYYAQVLVRGDSGAVQQIALPYATSASNPGRILYRGKNGNTWSSWAEFYTTANTTKASDGTVKAASPIARIAADRKTCLRTDISDDGFAWCGCGTANGEAEGITISRLDTGVYVIAGSAGLASSGWQLLPPRDPQGSGDLGIVEAEETESGGLTIRLYKRRYVLSEDGDIELQKGAAIDVPPTSWIDVRLEMPETSLWNQRAAGTQEQ

SEQ ID NO: 1424 - protein, 1163 aa, Kosakonia cowanii
MATLRELIIKISADSSSFQSEITRASRMGSDYYRTMQAGGRQAAAAAKESERALSDLTNGFASAGKAAAAATAAFATGKLVQIADEWNSVNARLQQASASADDFATSQRQLMEISQRTGTAFSDNANLFARAAASMREYGYSSEEVLKITEAVSTGLKLSGASTAEAGSVINQFSQALAQGVLRGEEFNTVNESGDRVIRALAAGMGVARKDLKSMADQGKLTIDKVVPALMSQLGTLQGEFATMPQTVSGSLQKVTNSFMGWVGGVNAATGATDALSGGLDGVAQTLDSFTSSAVSGALSDVADNMSVITTVAGALVGVGLAKYLSGIVTSATSATGALISAAKSEVALAVAQDRAAQSAVAASRADVYRAQQALQRAKGADVQAAQQEKIAAAEAKVTAAQSRLTTALAGGTATEKVRARAGLERAQAGLTAAKNADVQAVAERRLAQAEAARDRNLANRVSTQSNLNSVTAVGSRLMSSALGVIGGIPGLVMLGAGAWYAAYQNQEQARRSAQEYGRTIDEISKKTRAMSLPEASDNSEKAKKALDEQNRLIDEQKSKIESLKEQIAGSQYLINNPGPTTKGGFMINHLTSLKTVTDDLSTATEQLSVEQERLSQMQEKAASIQQTLEGLQYRRVSLIREEAANQNSAYQSLLMMNGQHQTFNHLLGLGNQLLMARQGMTLAPLRVPQAEASQKQTDALEKSRRELALSRLKGEAKERARLGYAADELGLTADPQFQTNRLEYINNGLEEWRNNEANKKQPKGPKTDEEKAADAYKRMIKQQKEQIALQGQSTELARVKYQVVEGELSTLDKAQKAELMRNAALIDQVKLREQLRNYEANLADSNASARAANDAQLIGYGQGTRFRERMQEQFNIRKEFEQKNTDLLRQRQAGDIDETFYQQGLALNKRYLEERLRDQEGYYTASDAQRGDWLTGMSEGYANWVDEATDYSAMAADGMKQAMGGAVTTITDMLNGNLDSWKDWGMNVLKIIETVLVNMMVANAASSLGSFFSFGASSAATASSGTAIQSAASNFTFNAKGNVYDSPSLSAYSGGVYQTPQLFAFAKGAGVFGEAGPEAIMPLTRAADGSLGVRAVGAPQFSGGGPSVSFGDININGGGQSTAGQGAAATAGRQLKDAIVTVINEQASMPGSPLWRLLKGA

SEQ ID NO: 1425 - protein, 1267 aa, Kosakonia cowanii
MTNTVIKGRKGGGTKTRTPVEAPDSIQSIARAKILVALGEGEFAGGLDGRSIYLGDASSYTPLQNADGSFNFNNVKYEFRSGTQDQTYIQGFPGVENELQVAYELKQAVPYVRSVSNTQLSALRIRLGWPSLLNQKDNGDKVGTRVEYAIDLSADGGTYVTVVNGAVDDKTTTLYERSHRIDLPKATTDWQLRVRRITPDSTTVNVVDSMRVEAVTEIIDAKLRYPNTALLYVEFDAKQFPNGIPQVVCNPKGRIIRVPDTYDPETRSYSGTWEGGFKWAWTDNPAWIYYDIVLNERFGLGQRIDATQIDKWELYRIAQYCDQLVPDGKGGSGMEPRFRCNVYIQERNDAWTVLRDLAGIFRGMTYWGDNKLYVLADMPRDLWHIYNHASVVDGKFTFADPSETTRNTAALVNWSDPANHYKDTPEVVYDNDLAMRFDYSQLEMTAIGCTRQSEANRRGRWALLTNGIGEVVTFSTGMDVPPVGEVIGVAANELAGRVIGGRVSAVSGRNITLDRAADVKAGNRLFLNLPSGVAQARTVQAVNGNTVTVTTTYSETPEAECCWGVDADDLFIALFRVTGTRDNDDGTFEVTGATYSPDIYAAVDTGARLDERPVSVIPPGVQAPPENIVIDSYSTVSQNIAITTMRAAWKPVKGAIAYEAEWRRDSGNWVSVPRTSSQGFEVPGIYAGRYLVRVRAVNASDVSSIWATSAEVTLTGKVGNPPKPVGFTATETVVFGIELNWGFPANTDDTLKTEIQYSLTGSADDAMLLADVPYPLRRYQQMGLKAGQIFWYRAQLVDRTGNESGYTDWVRGQSSTDVTDITEAVLAQIKDTELFKDLIENAVESSKAVADLAEAVKQNADGLAAAAGANRQTAEAIIGNALAIADVVVRQSAQQGANSAKFEQLREVIATETEARVTDVIRLEAKTDQNAAGITEVRQALANETEARATAVDQLTAQTEENKASVTALTQTVTDLDSSTASRFEEISAEIAGIDGSDIRGGIQSNSIALITTTLAQVNDRTRFSVQYGDNKAGIERVDNVMADASQAVAESLRTLDASSGVGTANTTDFAKTMADFSQVSATKINSLSVTVNGQQAAIVQNAQVSADINNNLNAMYSIKVGVDAAGRQYAAGMGIGVQNTPSGMQSQVIFLADRFAVMSQAGGTVSLPFVIQNGQTFISDAFFRDASIQFGKITDSLKSDNYAAGSAGWNLPKSGNAEFNQVTVRGAIYATNGNFNLTGPGNTTVINGLGVTVNLANGGLIRLGSW

SEQ ID NO: 1426 - protein, 154 aa, Kosakonia cowanii
MALTDKQEMFCREYLIDLNATQAAIRAGYSVKIARASGCENLTKPDIQNRIAELKVERNEQVNVNASYVLKRLIEIDQIELLGLNPWLRITNETITSACGSEFLFKELHFDPLGIKSTEGLDICWVGEAQSVSTDSRDILIPTFRKVGGNLDVI

SEQ ID NO: 1427 - protein, 277 aa, Kosakonia cowanii
MRLNAKELIAEARATTPTLPPAAAKLMTAMADRLDLQFVVLCESRNEANQLAGENALMKSAIKTHSESVHFCVGCGKDDPCSNDDVCYALEETPATDAFLASLRAEGVDGAIERIMVHTNHQHAGVAQALHILRMYAAQLRSKSVSPAGVDQPPASPAITPLPVERNQYGYWTHPVYEEFCDGREYISNEDFNVWMKDNGLEWKVDYRDEEALDPEVGGYDLSTWQPEAPAGEGWFVGSIHDTDDGAVCIWLRNKTEPSPETVIIARQFEQLKEAEK

SEQ ID NO: 1428 - protein, 481 aa, Kosakonia cowanii
MIYTTGSIAVSGNTLTGTGTNFTAAGSLIRNGCTVLALTSPAQVFQITSVDSATGLTVSPAASPAVPAGTKFAILLSDSLSVDGLAQDIAETFSMYQRYMGGFADVMNGSGDVTITINGQPVTVPGQKSLAKKGANSDITSLGALTTALSIQQGGTGGKTAAEARNKIGAASSGNNSDITSITGLTTALSIQQGGTGAKDASQGWLNLLNGRTPATARGDLQLGTAAVRDAYSTTGAILSVGDFGIGGTSGGAIVTNANLINANGIWGAGGGSGVNYFDNYSPILMMFRTPTTSGQLQATIDGKLAVRGYNGSTMSAWNQCYTTGNTTRAADGTIKAASPIVRIVKSKEDCTRPDIDEADFEWCGAGVANGEAEGVTLTREATGVYLLKGSAGLAKSGWQMSPPRDPQGSGDMGIVEAEQAEDGSLIIRLYKRRYVLSEDGDIELQKGVAIDVPPTSWIDVRLDMPENSIWNQHAESAQEE

SEQ ID NO: 1429 - protein, 112 aa, Kosakonia cowanii
MAVETFSWCPKVAAQADTSFRTRKAQFGDNYAQVAGDGINPVTSQWSVSFTGDEAYVLAIKAFLKRHAGWKSFIWKPPLEPAGLWRSESVQIATHGADLYTLSTTFIQAYHP

SEQ ID NO: 1430 - protein, 675 aa, Kosakonia cowanii
MGRALGLIGGVPGLVMLGAGAWYAMYQSQEQARQSAQEYARTIDQVSQKTRSMSLPEADDNRRKTVEALVEQNRLIDEQGKAVSAVKRQIDELNKARGQPGITKDNDLNIVKSLSILTDQLTVEENKLYLMREKSASIQQVLEGIERRRNDWIREQAWRQNAAYQSLLMMNGQHEKFNQLLGLGNQLLMARQGMTLAPMRVPQAEASQKQTEALEKSRRELALSRLKGEAKERARLGYAADELGLTADPQFQTNRLEYINNGLEEWRNNEANKKQPKGPKTDEEKAADAYKRMIKQQKEQIALQGQSTELARVKYQVVEGELSTLEKAQKAELMRNAALIDQVKLREQLRNYEANLADSNASARAANDAQLIGYGQGTRFRERMQEQFNIRKEFEQKNTDLLRQRQAGDIDETFYQQGLALNKRYLEERLRDQEGYYTASDAQRGDWLTGMSEGYANWVDEATDYSAMAADGMKQAMGGAVTTITDMLNGNLDSWKDWGMNVLKIIETVLVNMMVANAASSLGSLFSFGASSAATASSGTAIQSAASNFTFNAKGGVYDSPSLSAYSGGVYQTPQLFAFAKGAGVFGEAGPEAIMPLTRAADGSLGVRAVGAPQFSGGGPSVSFGDININGGAQSTAGQGAAATAGRQLKDAIVTVINEQASMPGSPLWRLLKGA

SEQ ID NO: 1431 - protein, 1267 aa, Kosakonia cowanii
MTNTAIKGRKGGSTKTRTPVEAPDSIQSIARAKILVALGEGEFAGGLDGRSIYLGDASSYTPLQNADGSYNFNNVKYEFRSGTQDQTYIQGFPGVENELQVAYELKAAVPYVRSVSNTQLSALRIRLGWPTLLNQKDNGDKVGTRVEYAIELSVDGGAYAPVVKGAVDDKTTTLYERSHRIDLPKATTGWQLRVRRITPDSTTVNVVDSMRVEAVTEIIDAKLRYPNTALLYIEFDAKQFPNGIPQVVCNPKGRIIRVPDTYDPETRTYSGTWEGGFKWAWTDNPAWIYYDIVLNERFGLGQRIDATQIDKWELYRIAQYCDQPVPDGKGGSGTEPRFRCNVYIQERNDAWTVLRDLAGIFRGMTYWGDNKLYVLADMPRDIWHIYNHASVVDGKFIYADPSETTRNTAALVNWSDPANHYKDTPEVVYDNDLAMRFDYSQLELTAIGCTRQSEANRRGRWALLTNGIGEVVTFSTGMDVPPVGEVIGVAANELAGRVIGGRVSAVSGRNITLDRAADVRAGNRLFLNLPSGVAQARTVQAVKGNVVTVTTAYSETPEAECCWGVDADDLFIALFRVTGTRNNDDGTFEVTGATYNPDIYAAVDTGARLDERPVSVIPPGVQAPPENIVIDSYSTVSQNIAITTMRAAWKPVKGAIAYEAEWRRDSGNWVSVPRTSSQGFEVPGIYAGRYLVRVRAVNASDVSSIWATSAEVTLTGKVGNPPKPVGFTASETVVFGIELNWGFPANTDDTLKTEIQYSLTGTEDDAMLLADVPYPLRRYQQMGLKAGQIFWYRAQLVDRTGNESGYTDWVRGQSSTDVTDITEAVLEQIKDTDLFKDLIENAVESSAKVAELAEAVRQNADGLAAAAGSNKQMAEAIIGNALAIADVVVRQSAQQGANSAKFEQLREVIATETEARVTDVIRLEAKTDQNAAGITEVRQALANETEARATAVDQLTAQTEENKASVTELTQTVTDLDSSTASRFEEISAEIAGIDGSDIRGGIQSNSIALITTTLAQVNDRTRLSVQYGDNKAGIERVDNVMADASQAVAESLRSLDASSGAGTANTTDFAKTMADFSQVSATKINSLTVTVNGQQAAIVQNAQVSADINNNLSAMYSIKVGVDANGRQYAAGMGIGVQNTPAGMQAQVLFVADRFAVMAQAGGTVSLPFVIENGQTFVNDAFFRDASIQFGKITDSLKSDNYVAGSAGWNLPKSGNAEFNQVTVRGSIYATNGNFNLTGPGNTTVINGVGVTVNLANGGLIRLGSW

SEQ ID NO: 1432 - protein, 252 aa, Kosakonia cowanii
MSISSDVQKLEPGSRVRLIEVDGEAFGAGILRFHNETLPHTEAEIIAAGGDASKLQPKSVWWQGLEYGAWPFELTGLTVSSDGQSARPTLTVANISGTIGALCRRFQGMAKAKVIIHETFAHYLDARNFSGGNPAANPNEERKQVYYIDRKSSSDDETVEFELSSPADLRGQLIPTRQIQPMCTWCMRGWYKTGNGCTYAGQNGWFDKDGNRVDDPSKDVCSGLLSTGCKPRFGANNELDYGGFPGASLLRG

SEQ ID NO: 1433 - protein, 199 aa, Kosakonia cowanii
MEKRTVIKLSGSMAQLFGRTHRRALSSASEVFRALSSTVDGFEDYLREARARGLDFVIFRDRRNIGQEEFSLLGPGDELRIIPVIRGSKRAGIFQAVLGAALIAGGIALGPAGAGLIGKGVALNVALVGASMALGGVVQLLSPQVAGMRMRQDPDNKPSYAFGGPVNTTASGNPVPLLYGQREIGGAVISAGIYAEDQQ

SEQ ID NO: 1434 - protein, 115 aa, Kosakonia cowanii
MNFPESVGPVPVVRTPDGYWCHPALTAFYRDRDCVPQAEYDHWLADNGLEDTLVCLDPDEDTPAAQAYARNADISYWTPPVPAGEGWFTGAIFDDEDYGPACIWLRRREVPCDAG

SEQ ID NO: 1435 - protein, 224 aa, Kosakonia cowanii
MPHFFRIDASALRHSPSSVWSLMQTPSGARLHLCGDTRAVAAARFIKRPTLFRAFIKANPFLLIASRRGIRATKNRALQRAGDTNMRMNAKELIADARVTSPTLPPAAAKLMTAMADRLDVQFVALCESRSEAKHLAGENAVMKSAIKTHSESVHFCVGCGQDDPCSNDDICHVLEETPATDAFLANQCAETVDSAVGLLRILFNHQAPVLENVTSALQAFAAQ

SEQ ID NO: 1436 - protein, 258 aa, Kosakonia cowanii
MRMNAKELIAEARTTAPTLPPAAAKLMTAMADRLDLQFVVLCESRNEAKQLAGENAVMKSAIKTHSESVHFCVGCGQDDPCSNDDICHVLEETPTTDAFLANQCAETVDSAVGLLRILFNHQAPVLENVTSALQAFAAQLRCKSVAPSGFDQAPVRPSITALTVERNQYGYWTHPVYEEFCDGREYISNEEFNVWMKDNGLEWKVDYRDEEALDPEVDGYDLSTWQPEAPAGEGWFVGSIHDTDDGAVCIWLRNKAGE

SEQ ID NO: 1437 - protein, 206 aa, Kosakonia cowanii
MIYTTGSIAVSGNTLTGTGTNFTQAGSLIRNGCTVLALTSPAQAFQITAIDSATSLTVTPAASPAIPAGTKFAILLSDSLSVDGLAQDIAETFTMYQRYMGGFADVMNGAGDVTITINGTPVTVPGQKSLAKKGANSDITSLSGLTTALSIAQGGTGAKDAAGARAAFDLDNLYLRGDRNLADVKSKKTARDNLGVNASPNMWYVW

SEQ ID NO: 1438 - protein, 159 aa, Kosakonia cowanii
MIYTTGSIAVSGNTLTGTGTNFTQAGSLIRSGCTVLALTSPAQAFQITSINSATSLTVTPAASPAVTAGTSFAILLSDSLSVDGLAQDIAETLTMYQRYMGGFADVMNGAGDVTITINGQPVTVPGQKSLAKKGANSDITSLSGLTTALSIAQGGTGAK

SEQ ID NO: 1439 - protein, 213 aa, Kosakonia cowanii
MVQSKASLGFNLFLAKMGIQDPAPAIDGLMRYALALKNPVLGKLSEKARGEVLPVLVQFAYADYSRSAASKSTCPHCEGKGVVREMQDVVKHPGVNGVEATVKYEAVEVMCQHCAGKGEVGTACRGCKGKGTVLDEKRTKLLGAPVRKVCGRCNGYRFSRLPTTLARARIEKIIPDLTSYQWYSGYGDVIALLVTKCWQEETFAESQLRRVTR

SEQ ID NO: 1440 - protein, 218 aa, Kosakonia cowanii
MAAQGMVQSKASLGFNLFLAKMGIQDPAPAIDGLMQYALALKNPVLGKLSEKARGEVLPVLVQFAYADYSRSAASKSTCTHCEGKGVVREMQDVVKHPGVNGVKAMVKHEAVEVMCQHCAGKGEVGTACRGCKGKGTVLDEKRTKLHGAPVRKVCGRCNGNCFSRLPTTLARARIEKIIPDLTSYQWYSGYGDVIALLVTKCWQEEAFAEMQLRKVTR

SEQ ID NO: 1441 - protein, 83 aa, Kosakonia cowanii
MKMLNAAAVMLVSLMASGCASNTPPLCYNGAVVMKSRVTVPVFGIRKPVSATEYLSGGSFGYQWVERSAFTDTASCDRLPLTE

SEQ ID NO: 1442 - protein, 317 aa, Kosakonia cowanii
MQMFIAGTSFDAINAMAASYVLDVITITGTGSKTYSLSGVELTYAIVNDFMGGQLTGATYSVSVSGLTVSWNVNNAVTLIVYGSPVAGTQSDYFGFQLFQYLNGMRTVKLAPNYVPLCLREIIDVPAGARTVQTQVPAGNPVMCFHRHTGAAMDICWWKPATVSGYHALQFPTDGSNQTGCRVYVFSNILANTPDYGFYLYRDGQMVWHSNCLPLQVIPLTNGDITTDTPLAVSSSVTAHIFVPQDPAYPTGYSNFMCASAGNDGTRYKVQVGKVFQSTFISSPDEGRRMRGWACGGVGYIETQFYDQYYRYALGLA

SEQ ID NO: 1443 - protein, 115 aa, Kosakonia cowanii
MNLPESVGPVPVVRTPDGYWCHPALTAFYRDRDCVPQAEYDHWLADNGLEDTLVCLDTDDDTPAAQAYARNADISYWTPPVPAGEGWFTGAIFDSEDDGPACIWLRRREVPCDAG

SEQ ID NO: 1444 - protein, 369 aa, Kosakonia cowanii
MFRLKPATFAVCLLPFALVACGDASDNSDPRSLPPLVRSAAAINANHSSRAFTGVVVARIQSDLGFRVQGKILERLVDTGQAVKRGQPLMRLDPVDLSLQAQAQQQAVAAAKARARQTADDESRYRGLVTTGAVSASAYDQIKAAADTARADLSAAQAQANVAQNAMSYAVLVADDDGVVMDTLAEPGQVVSAGQPVIRLARAGQREAVVQLPETLRPSPGSTAQASLYGSDKQPVSATLRLLSDAADPLTRTFEARYVLNGPLSGAPLGSTVTIHIAQGRASQPLLQVPLAAVFDAGKGPGVWSISGNPARVAWRPVQVVSLGDDAASVTGSLKPGEQVVALGAHLLHDGETVRLAKQSDVSVAGSQP

SEQ ID NO: 1445 - protein, 1036 aa, Kosakonia cowanii
MSSGRFNLSALAVRERSVTLFLILLITVAGILSFLGLGRAEDPPFTVKQMTIISAWPGATAQEMQDQVAEPLEKRLQELKWYDRTETYTRPGLAFTMLSLQDSTPPSEVQEEFYQARKKLSDEARNLPAGVIGPMVNDEFSDVTFALFALKAKGEPQRLLVRDAESLRQRLLHVPGVKKVNIIGEQAERIFVSFSHDRLATLGISPQDIFAALNNQNVLTPAGSIDTRGPQVFIRLDGAFDKLEKIRETPVVSQGRTLKLSDVATVERGYEDPATFMVRNQSEPALLLGIVMREGWNGLDLGKALDKEAASINADMPLGMTFTKVTDQSVNISSAVDEFMIKFFVALLVVMVVCFLSMGWRVGVVVAAAVPLTLAVVFVIMEASGKNFDRITLGSLILALGLLVDDAIIAIEMMVVKMEEGYDRIKASAYAWSHTAAPMLAGTLVTAVGFMPNGFAQSTAGEYTSNMFWIVGIALIASWVVAVVFTPYLGVKMLPDIKTVEGGHDAIYNTRRYNRFRQLLTRVIARKWLVAGAVVAVFTVAVLGMALVKKQFFPTSDRPEVLVEVQMPYGTSIEQTSAAVTKIEDWLRRQKEAKIVTAYIGQGSPRFYLAMAPELPDPSFAKIVVLTDSQEAREALKFRLRQAAADGLAPEARVRVTQLVFGPYSPYPVAFRVTGPDPTVLRDIADKVKTLMQASPLMRTVNTDWGSRVPTLHFTLNQDRLQAVGLTSNSVAQQLQFLLSGVPVTAVREDIRSVQVMGRAAGDIRLDPAKIADFTLVGSAGQRIPLSQAGEVEVRMEDPVLRRRDRMPTITVRGDIAESQQPPDVSTAIMKQLQPIITTLPDGYRIDEAGSIEESGKATKAMAPLFPIMIAMTLLIIILQVRSMSAMVMVFMTAPLGLVGVVPTLLLFNQPFGINALVGLIALSGILMRNTLILIGQIHHNEQEGLAPFHAVIEATVQRSRPVLLTAMAAILAFIPLTHSVFWGTLAYTLIGGTLGGTIITLVFLPAMYAIWFRIKSPDSNSSTENRSASGGLKNV

SEQ ID NO: 1446 - protein, 162 aa, Kosakonia cowanii
MTRIGILGVNDLTDTILVELFRLDPCAHVFLSSVEHERANLLARKFPCWIQDDVQAVINEADIIIITTGTSSPENPSEKIEYRKSQLIFFLEAWPSINNQVFSPHTDKKINFTTRHVALANISPFIHLTEVQIDDYLFILKVLLVAMKPVHTLDVNFRSSSE

SEQ ID NO: 1447 - protein, 127 aa, Kosakonia cowanii
MNRKAFINDLISWINNNIESHLKIDDAAIKSGHSKWRLQRLFLAETGQTLGQFIREKKLVLIADKLISSNEPLINLAINYVFDSQQSFTKAFHKKYQLPPQKNIERNLTVSIVTFFISTESKITIIT

SEQ ID NO: 1448 - protein, 269 aa, Kosakonia cowanii
MSEHKVVLITGVSSGIGRAAALAFKARGCQVFGTVRDINSASPLNGITLTEMDVRDEHSVQQAIERVIAKAGCIDVLVNSAGVSLVGAVEETSVEEATRLFDTNFFGALRTTRAVLPHMRSQKSGRIVNVSSVLGFLPAPFMGIYAASKHALEGMSETLDHELRGSGVRVTLVEPSFTRTKLDVNSAETAEKIAFYKDARDQTLGAILKKAGTASLPEVVAGAIVAATLGPWKMRYTPGGEATLLARLRRFAPASMVSKGLRKTFEMKE

SEQ ID NO: 1449 - protein, 162 aa, Kosakonia cowanii
MRLNAKELIAEARVTAPTLPPAAAKLMTAMADRLDLQFVVLCESRNEAKQLAGENAQMKSAIKTHSESVHFCVGCGKDDPCSNDDVCYALEETPATDAFLASLRAEAITDALENSSEYLDTDCVRDRHDISYEDAELRAAGAMELRDSLLVVANQLRNGVQS

SEQ ID NO: 1450 - protein, 419 aa, Kosakonia cowanii
MIYTTGSIAVSGNTLTGTGTNFTAAGSLIRNGCTVLALTSPAQAFQISSVDSATSLTVSPAASVPAGTKFAILLSDSLSVDGLAQDIAETFSMYQRYMGGFTDVMNGSGDVTITINGQPVTVPGQKSLAKKGANADITSLNGLTTAITLAQGGTGAKTAAGARTSLGLGSMATQSSDAVNITGGSGTFTSLSSDAVTITGGTASLGTIETKAGAEQPLVIRTAPSGLGYIRFRDASENPLAYLGFGASGAQHFILASNIGVNSVTLNTTGAVTVKAGGANYAFQTNGTATGQLWQSTSDVRIKKDIKPITNAREVISAISGYTFKKRYNLYDVAEPLYTEEAGILAQELELVAPEAVSKNDFGAHDLENNPIDDLRAVNYAGITPYLIELAKLHEAEISGLKGEVAELKALVSSLAQGS

SEQ ID NO: 1451 - protein, 235 aa, Kosakonia cowanii
MRQKTIDAILAHAAAEYPRECCGVVAQKSRVERYFPCRNLAAAPEDNFVLCPEDYAAAEDWGTVIAVAHSHPDATTQPSELDKAQCDATLLPWHIVSWPEGDLRTIQPRGELPLLERPFVLGHFDCWGLVMSYYRQTHGIELHDYRVDYPWWENNYPDNFYEECWYECGFREFDGPPKPGDMVIMQVQSDKWNHAGILLEGNMLLHHLYGHLSQRVPYGGYWRERTMKVLRYKSL

SEQ ID NO: 1452 - protein, 112 aa, Kosakonia cowanii
MAIEEFTWFPRINAQQEVTFRTRTAQFGDGYKQVSGDGLNPRSQKWTMEFTGDEAYITAIKAFLDRHGGTRSFSWRPPLEPLGLYRCNTYTPTPLGARKYNLSATFEQAFAP

SEQ ID NO: 1453 - protein, 1170 aa, Kosakonia cowanii
MATLRELIIKISANSQSFQTEIARASRMGQDYYRVMQNGGRQAAAAARESERALSDLTSGLASAGRAAAAASAAFATGKIVQIADEWTSVNARLRQASASSDDFANSQRRLMSISQATGTAFTDNANLFSRAAASMREFGYSSDEVLKVTEAVSTGLKLSGASTAEAGSVITQFSQALAQGVLRGEEFNAVNESGDRVIRALAAGMGVARKDLKSMADQGKLTIDVVVPAIISQLGTLQGEFAAMPQTVSGSVEKVANSFMAWVGGISQATGATDMLSGGLDGLAATLDSLTSSAVTGALNDVADNMATITTVAGALVGVGLAKYLGGIVTSATGATTSLIAAAKSEVALAVAQDRAAQSSVAAARADVYRAQQALQRAKSADVQAAQQERVAAAEAKVTAAQARLTAAQASGTATEKVKARSALERAQAALVAAKSTDAQAVAERRLAAAQTGLNNNIANRVTAQNNLNGVTSVGTRLLGGAMGLIGGIPGLVMLGAGAWYAMYQNQEQARQSAQEYAKTIDEVSRKTRAMTLPEAEDNRGKTVQALVEQNRLIDEQEKAIAAVKRQLDDLNKTRGQPGMTGDNDLNIVKAMGLLTDQLTVEEDKLNQMREKSRGIQQALEAIERRRNDLIREHAWRQNAQYQSLLMMNGQYEDFNRLLGLGNQLLASRSQLIKAPFAILQAPVSDNDKQALLQKQQAAELAGLTGLDKINRQVDFELQKLGKTGPENSKFAAGWRQAAIDEYNKSQNLAAAQKAQAEATRDAGKAQREAAQTAEQYSRKIADLSVAIEVQKVRAKEGEQAAELYAAANQTGAKWTEEQRTAIRAQSAELARLTQLADDHVRKIREQADALKDLREASRKFSDEAEFAAETSGMGDRQKQRYEETQQVERVYSKTDQSAQAFHEKEMALASLDKKYREIAASESNWRNGVSRGYNSWFDEMTNIAGTVSDGVKSSLDGAFSNVTSMLEGNKVSWKSWGISVLQIIEKIALQMAVVSAMGSVSSSSGLIGSLVGGVTSFFSGGGAGASPAGQSFAVPSFTPNALGGVYDSPSLSTYSNGIYNSPQFFAFAQGAGVFAEAGPEAIMPLTRASDGSLGVRAVGSGVNNVSTTGAAPQVNVYITESGNKSTATPGYEQLGREAGAFIDRRYRELIGRDLAPGGNIWNLAKGNR

SEQ ID NO: 1454 - protein, 1252 aa, Kosakonia cowanii
MAHATVIRGRKGGGSKSRTPTEHPDDLQSVAKAKILIALGEGEFSGQLTGRDIYLDGTAIENADGTQNFSGVTWEFRAGTQAQKYIQGIPGTENEINVGTEVSSSIAWTRTFTNTQLSAVRLRLKWPSLFKQEDDGDLVGNSVKYAIDLQTDGGAWRTVLNTSVTGKTTSGYERSHRIDLPQAGSTWTIRLRKISADANSAKIGDTMLLQSFTEVIDAKLRYPNTALLYVEFDSSQFNGSIPQISCEPRGRVIRVPDTYDPETRTYSGTWTGAFKWAWTDNPAWIFYDLVVSDRFGLGQRLTAANIDKWTLYQVAQYCDQKVPDGKGGSGTEPRYTCNVYVQDRNEAYTVLRDFAAIFRGMTYWGGDQIVALADMPRDVDYSYTRANVVGGRFAYSSSTTKTRYTTALVSWSDPDNAYADAMEPVFEQALVARYGFNQLEMTAIGCTRQSEANRKGRWGILTNNKDRVVSFDVGLDGNIPQPGYIIAVADEMLSGKVMGGRISAVNGRVITLDRKPDAVAGGRLILNLPSGASQSRTIQVVNGKSVTVTTAYSETPQTEAVWVVESGELYAQQYRVVSVSDNGDGTFSISGAWHDPDKYARIDTGAVIDQRPVSVIPPGNQTPPANIVISSFSVVQQNISVETMRVSWDQAQNAIAYEAQWRRNDGNWVNVPRSSTTSFDVPGIYAGRYLVRVRAINAAEISSGWGYSEEKTLTGKVGNPPKPVGFIASDSVVFGIELNWGFPANTDDTLKTEIQYSLTGSADDAMLLADVPYPLRKYQQMGLKAGQIFWYRAQLVDRTGNESGYTDWVRGQSSSDVTDITEAVLEEIKDTELFKDLIENAVESSAKVAELAEAVRQNADGLAAAAGSNKQMAEAIIGNALAIADVVVRQSAQQGANSAKFEQLREVIATETEARVTDVIRLEAKTDQNAAGITEVRQALANETEARATAVDQLTAQTEENKASVTALTQTVTDLDSSTVSRFDEISAEIAGIDGSDIRGGIQSNSIALITTTLAQVNDRTRLSVQYGDNKAGIERVDNVMADASQAVAESLRSLDASSGAGTANTTDFAKTMADFSQVSATKINSLSVTVNGQQAAIVQNAQVSADINNNLNAMYSIKVGVDAAGRQYAAGMGIGVQNTPSGMQSQVIFLADRFAVMSQAGGTVSLPFVIQNGQTFINEAFINYASITLARVGSWYSANYVAGQTGTIMKADGTFEVNGAVSGQGRMQITNNRIISYDAQNRPAAVMGQRL

SEQ ID NO: 1455 - protein, 251 aa, Kosakonia cowanii
MSLNSDYQKLEPGDEVRLYEVDGTTFGTGEVLRFHSYSLAHTEAEIAAAGGNENKLPAKSIWWQGEEYKAWPCKIEGIEASTSGSSAQPKLSVANLDSSITALCLAYDDMLQAKVTIHDTLGKYLDAKNFAGGNPSADPTQEKLKVFYIDAKSSETNEMVEFTLASPMDLQGLLIPTRQLHFLCTWCIRNKYRTGDGCDYAGSRYFDKNNNPVSDPSLDECNGTLTACKLRFGENNELSFGGFPGTSLIRS

SEQ ID NO: 1456 - protein, 202 aa, Kosakonia cowanii
MTEIMTRIELGGVLGKTFGKVHHRIVSTAHEATRALSATVEGFEQFMISSQRRGLTYAVFKGKKNIGLDDLGFPVSGEVIRIVPVIIGSKKAGLLQTILGAVLITAAVLAGPGGIGAAFTAGGLTGFAAATGVSLAIGGVIQLLSPQPKGLASKQSADNRASYAFGGVTNTAAQGYPVPLLYGRRRIGGAIISAGIYVEDQQ

SEQ ID NO: 1457 - protein, 381 aa, Kosakonia cowanii
MAARPRSHKISVPNLYCKLDKRTGKIYWQYKHPLSGRFHSLGTDEAEAKQVATEANMIIAEQRTRQILSVNDRLARMKGKRTDITVTEWLDKYMAIQEERLKHNELRPNSFKQKNKPVRLFREHCGLQHLKDITTLDIAEITDAIKAEGHNRMAQVVRLVLIDVFKEAQHSGHVPPGYNPAQATKQPRNKVTRQRLSLDEWKKIYTSAEQQEPYLQCGMLLALITGQRLGDICNMQFKDIWDDMLHVEQEKTGSRLAIPLDLKCDAIGLSLRDVISKCRDAVVSKYLVHFRHTSAQATRGDQVSTSSLTSTFKKARDKSGLNWDKGTAPTFHEQRSLSERLYREQGVDTQKLLGHKTQKMTDRYNDDRGKDWVVVSAKTGS

SEQ ID NO: 1458 - protein, 317 aa, Kosakonia cowanii
MQMFIAGTSFDAINAMAASYVLDVITITGTGSKTYSLSGVSLTYAIVNDFMGGQLTGATYSVSVSGLTVSWNVNNAVTLIVYGSPVAGTQSDYFGFQLFQYINGVRTVKLAPNYVPLCLRQIIDVPAGARTVQTQVPAGNPVMCFHRHTGEAMDLCWWKPVTASGYHALQFPTAASNQTGCRVYVFSNILANIPDYGFFLYRDGQMVWHSNCLPLQVIPLTNGDITSATPLAVSSSVTSHIFVPQDPAYPTGYSNFMCASAGKDGAAYKVQVGKVFQSTYISNPDEGRRMRGWACGGVGYIDTRFYDQYYKSALGIT

SEQ ID NO: 1459 - protein, 156 aa, Kosakonia cowanii
EREVFDAPESRVNLAGLSSAASPENSTAAAEPAQADTQPATNTADLAEKFRQAIINADAPAVVQTLRGEIDKTKSSLGTALFVELKNRAVARFYLLTAIEKLNQAINELPKPGADGASDAFAALERLYTSNKRHLGAELEEQYSITLADMKPEYAA

SEQ ID NO: 1460 - protein, 161 aa, Kosakonia cowanii
MRMNAKELIADARATAPTLPPAAAKLMTAMADRLDVQFAALCESRNEAKQLAGENALMKSAIKTHSESVHFCVGCGKDDPCSNDDVCHALEETPVTDAFLASLRAQAITDALENSSDYLDTDCVMDRHDISYQDAELRAAGAMEMHDSLVAVANHLRNKAG

SEQ ID NO: 1461 - protein, 422 aa, Kosakonia cowanii
MIYTTGSIAVSGNTLTGTGTNFTAAGSLIRNGCTVLALTSPAQAFQITAINSATSLTVTPAASPAVPPGTKFAILLSDSLSVDGLAQDIAETFTMYQGYMSGFADVMKGVGDVTITINGEPVTVPGQKSLVKKGANSDITSLSGLTTALSIGQGGTGAKDAAGARKALQLGGAATLEVGTAAGTVAAGNDPRLTTLDGKSGGSITGRISMPSGTVGTYLSAAQNAGVRQRVVNDTSATSAVGALTWAYNNGSGYQLDTTWGSVGLGASAWPYTFMMQTANETDFGARIWTFSMATGDIICSGSGSQAGTFTFTKASNSDREIKHDIVYTDGQESYENVKKYSPTSFVYNDDPQGRKRRGVIAQDVQEIDPEYVRAILNPFTMKTSLSLDTNVMLLDVALALKVAISKIEALEDTVQQLRYGS

SEQ ID NO: 1462 - protein, 236 aa, Kosakonia cowanii
MRDKTISAILAHAAQAFPAECCGVVIQKGRVEKYVACRNLATAPEEQFELSPEDYAAAEDQGTVVAVVHSHPGDGATTQPSELDMLMCDATEVPWVIASWPEGDIRTIMPRGDRPLTGRQFVLGHADCWSLIRDYFRTEHGIALPDYSVDRHWWEEGENLYMDNWYDCGFREFDGPSRPGDMVIMQVQASVPNHAGVLLEGNMLLHHLYGQLSQRMPYGGYYRDRTIKVLRYKDLM

SEQ ID NO: 1463 - protein, 112 aa, Kosakonia cowanii
MAVETFSWCPKVAAQADTSFRTRKAQFGDNYAQVAGDGINPVTPQWSVSFTGDEAYVLDIKAFLNRHAGWKSFVWKPPLEPAGLWRSESLQIATHGADLYTLSTTFIQAYHP

SEQ ID NO: 1464 - protein, 1163 aa, Kosakonia cowanii
MATLRELIIKISADSSSFQSEITRASRMGSDYYRTMQAGGRQAAAAAKESERALSDLTNGFASAGKAAATAAAAFATGKLVQIADEWNSVNARLQQASSSADDFATSQRQLMEISQRTGTAFSDNASLFARAAASMREYGYSSEEVLKITEAVSTGLKLSGASTQESSSVITQFSQALAQGVLRGEEFNAVNEAGDRVIRALATGMGVARKDLKSMADQGKLTIDKVVPALMSQLGALQGEFATMPQTVSGSLQKVTNSFMGWVGGVNAATGATDALSGGLDGIAQTLDSFTSSAVSGALSDVADNMSTITTVAGALVGVGLAKYLGGIVTSATSATGALISAAKSEVALAVAQDKAAQSAVAASRADVYRAQQALQRAKGADVQAAQQEKIAAAEAKVTAAQSRLTTALAGGTATEKVRARAALERAQAGLTAAKNADVQAVAERRLAQAEAARDRNLANRVSTQSNLNSVTAVGSRLMSSALGVIGGIPGLVMLGAGAWYAAYQNQEQARRSAQEYGRTIDEISKKTRAMSLPEASDNSEKAKKALDEQNRLIDEQKSKIESLKVQIAGSQYLINNPGPTTKGGFMINHLTSMKTVTDELSTATEQLSVEQERLSQMQEKAASIQQALEGFQYRRVSLIREEAAHQNAAYQSLLMMNGQHQTFNQLLGLGNQLLMARQGMTLAPLRVPQAEASQKQTDALEKSRRELALSRLKGEAKERARLGYAADELGLTADPQFQTNRLEYINNGLEEWRNNEANKKQPKGPKTDEEKAADAYKRMIKQQKEQIALQGQSTELARVKYQVVEGELSTLDKAQKAELMRNAALIDQVKLREQLRNYEANLADSNASARAANDAQLIGYGQGTRFRERMQEQFNIRKEFEQKNTDLLRQRQAGDIDETFYQQGLALNRRYLEERLRDQEGYYTASDAQRGDWLTGMSEGYANWVDEATDYSAMAADGMKQAMGGAVTTITDMLNGNLDSWKDWGMNVLKIIETVLVNMMVANAASSIGSLFSFGASSAATASSGTAIQSAASNFTFNAKGGVYDSPSLSAYSGGVYQTPQLFAFAKGAGVFGEAGPEAIMPLTRAADGSLGVRAVGAPQFSGGGPSVSFGDININGGAQSTAGQGAAATAGRQLKDAIVTVINEQASMPGSPLWRLLKGA

SEQ ID NO: 1465 - protein, 1253 aa, Kosakonia cowanii
MTTTIIKGRKGGGTKTRTPVEAPDSIQSIARAKILVALGEGEFAGGLDGRSIYLGDASSYTPLQNADGSYNFNNVKYEFRSGTQDQSYIQGFPGVENELQVAYELKAAVPYVRSVSNTQLSALRIRLGWPSLLNQKDNGDKVGTRVEYAIDLSVDGGAYDTVVNGAVDDKTTTLYERSHRIDLPKATTGWQLRVRRITPDSTTVNVVDSMRVEAVTEIIDAKLRYPNTALLYIEFDAKQFPNGIPQVVCNPKGRIIRVPDTYDPDTRTYSGTWEGGFKWAWTDNPAWIYYDIVLNERFGLGQRIDATQIDKWELYRIAQYCDQPVPDGKGGSGTEPRFRCNVYIQERNDAWTVLRDLAGIFRGMTYWGDNKLYVLADMPRDIWHIYNHASVVDGKFTFADPSETTRNTAALVNWSDPANHYKDTPEVVYDNDLAMRFDYSQLEMTAIGCTRQSEANRRGRWALLTNGIGEVVTFSTGMDVPPVGEVIGVAANELAGRVIGGRVSAVSGRNITLDRAADVKAGNRLFLNLPSGVAQARTVQAVNGNIVTVTTAYSETPEAECCWGVDADDLFIALFRVTGTRDNDDGTFEVTGATYSPDIYAAVDTGARLDERPVSVIPPGVQAPPENIVIDSYSTVSQNIAITTMRVAWDSVKGAIAYEAEWRRDSGNWVSVPRTSSQGFEVPGIYAGRYLVRVRAVNASDVSSIWATSAEVTLTGKVGNPPKPVGLTASETVVFGIELNWGFPANTDDTLKTEIQYSLTGTDDDAMLLADVPYPLRKYQQMGLKAGQVFWYRAQLVDRTGNESGYTDWVRGQSSSDVTDITEAVLAQIKDTDLFKDLIENAVESSQAVADLAEAVKQNADGLAAAAGANRQTAEAIIGNALAIADVVVRQSAQQGANSARFEQLREVIATETVARVTDVIRLEAKTDQNTAGITEVRQALANETEARATAVDQLTAQTEENKASVTELTQTVTDLDSSTASRFEEISAEIAGIDGSEIRGGIQSNSIALITTTLAQVSQSNRMSVQYGANAASIQRVDTVMADASQAVAESLRTLDASAGGGTANATDFAKTMADFSQVSATRINSLSVTVNGQQAAIVQNAQVSADINNNLNAMYSIKVGVDANGRQYAAGMGIGVQNTPAGMQSQVLFVADRFAVMTQAGGTVSLPFLVQNGQTFINEAFINYASITLARVGSWYSANYVAGQTGTIMKADGTFEVNGAVSGQGRMQITNNRIISFDAQNRPAAVMGQRL

SEQ ID NO: 1466 - protein, 252 aa, Kosakonia cowanii
MSISSDVQKLEPGSRVRLIEVDGEAFGAGILRFHNETLPHTEAEITAAGGDASKLPPKSVWWQGLEYGAWPFELTGLSVSSDGQSARPTLTVANISGTIGALCRRFQGMAKAKVIIHDTFAHYLDARNFAGGNPAANPTEERRQVYYIDRKSSSDDETVEFELSSPADLRGQLIPTRQIQPMCTWCMRGWYKTGNGCTYAGQNGWFDKDGNPVDDPSKDVCSGLLSTGCKPRFGAENEVDFGGMPGASLLRG

SEQ ID NO: 1467 - protein, 199 aa, Kosakonia cowanii
MEKRTVIKLSGSMAQRFGRTHRRALSSASEVFRALSSTVDGFEDYLREARARGLDFVIFRDRRNIGQEEFSLLGPGDELRIIPVIRGSKRAGIFQAVLGAALIAGGIALGPAGAGLIGKGVALNVALVGASMALGGVVQLLSPQVAGMRMRQDPDNKPSYAFGGPVNTTASGNPVPLLYGQREIGGAVISAGIYAEDQQ

SEQ ID NO: 1468 - protein, 83 aa, Kosakonia cowanii
MKIINAAAVVLVSILATGCASNTPPLCYNGAVVMKNRVSVPVFGIRKPVSTTEYLSGGSFGYQWVERSAFTDTSTCDRLPLTE

SEQ ID NO: 1469 - protein, 318 aa, Kosakonia cowanii
MQMFIAGTSFDAINAMAASYVLDVIAITGTGSKTYSLAGVELTYAIVNDFMGGQLTGATYSVSVSGLTVSWNVNNAVTLIVYGSPVAGTQSDYFGFQLFQYLNGVRTVKLAPNYVPLCLREIIDVPAGARTVQTQVPAGNPVMCFHRHTGAAMDISWWKPATANGYHALQFPTDGSNQTGCRVYVFSNILANIPDYGFYLYRDGQMVWHSNCLPLQVNPLTNGDITSDTPLAVSSSVTAHIFVPQDPAYPTGYSNFMCASAGNDGTRYKVQVGKVFQSTYISSPDEGRRMRGWACGGVGYIETQFYDQYYRYALGLAG

SEQ ID NO: 1470 - protein, 150 aa, Kosakonia cowanii
MNPINFIKNNSHIIVIGLICVALWGLNARNAQLTATNERLEKLANSKDDQINDLRSKNDGLAASVGELVTAVRQQNQVMSQVTEQRAVTAQQNRKLQNEIKQYLEADKCAQSRVPDNAADRLRAAAKAAGGVPDNKPAANQPAGRADLTH

SEQ ID NO: 1471 - protein, 136 aa, Kosakonia cowanii
MRMNAKELIAEARTTAPTLPPAAAKLMTAMADRLDLQFVVLCESRNEAKQLAGENAVMKSAIKTHSESVHFCVGCGQDDPCSNDDICHVLEETPTTDAFLANQCAETVDSAVGLLRILFNHQAPVLENVTSALQAF

SEQ ID NO: 1472 - protein, 236 aa, Kosakonia cowanii
MRDKTISAILAHAAQTFPAECCGVVIQKGRVEKYVACRNLATSPEEQFELSPEDYAAAEEQGTVVAVVHSHPGDGATTQPSELDMLMCDATEVPWVVASWPEGDIRTIMPRGDRPLTGRQFVLGHADCWSLIRDYFRTEHGIALPDYSVDRHWWEEGENLYMDNWYACGFREFDGPSRPGDMVIMQVQASVPNHAGVLLEGNMLLHHLYGQLSQRIPYGGYYRDRTIKVLRYKDLM

SEQ ID NO: 1473 - protein, 112 aa, Kosakonia cowanii
MAVETFSWCPKVAAQADTSFRIRKAQFGDNYAQVAGDGINPVTPQWSVSFTGDEAYVQAIKSFLKRHAGWKSFIWKPPLEPAGLWRSESLQIATHGNDKYTLSTTFIQAYHP

SEQ ID NO: 1474 - protein, 252 aa, Kosakonia cowanii
MSISSDVQKLEPGSRVRLIEVDGEAFGAGILRFHNETLPHTEAEIIAAGGDASKLQPKSVWWQGLEYGAWPFELTGLSVSSDGQSARPTLTVANISGTIGALCRRFQGMAKAKVIIHETLAHYLDARNFAGGNPGANPNEERKQVYYIDRKSSSDDETVEFELSSPADLRGQLIPTRQIQPMCTWCMRGWYKTGNGCTYAGQNGWFDKDGNRVDDPSKDVCSGLLSTGCKPRFGANSELDYGGFPGASLLRG

SEQ ID NO: 1475 - protein, 199 aa, Kosakonia cowanii
MEKRTVIKLSGSMAQRFGRTHRRVLSSASEVFRALSSTVDGFEDYLREARARGLDFVIFRDRRNISQEEFSLLGPGDELRIIPVIRGSKRAGIFQAVLGVALIAGGIALGPAGAGLIGKGVALNVALVGASMALGGVVQLLSPQVAGMRMRQDPDNKPSYAFGGPVNTTASGNPVPLLYGQREIGGAIISAGIYAEDQQ

SEQ ID NO: 1476 - protein, 252 aa, Kosakonia cowanii
MNLESLPKFYSPKSPKLNDQTPATGGVALTITDVMAAQGMVQSKASLGFNLFLAKMGIQDPAPAIDGLMQYALALKNPVLWKLSEKARGEVLPVLVQFAYADYSRSAASKSTCPHCEGKGVVREMQDVVKHPGVNGVEATVKHEAVEVMCQHCAGKGEVGTACRGCKGKGTVLDEKRTKLHGTPVRKVCGRCNGNRFSRLPTTLARARIEKIIPDLTSYQWYSGYGDVIALLVTKCWQEEAFAEVQLRKVTR

SEQ ID NO: 1477 - protein, 204 aa, Kosakonia cowanii
MPKEMNINAVRGPSDHSVRDQVVEAATEHFGHFGYEKTTVSDLAKAIGFSKAYIYKFFDSKQAIGEVICANRLAMMIDIVNAAIADAPSASEQLRRLFNAVVQAGSDLFFHDRKLYDIAAVAARDKWPSAQAHEQRLRQLIEQIVKAGREAGEFERKTPLDEAADAIYLVMRPYISPVQLQYNLETAPAAAVFLSSLILRSLAP

SEQ ID NO: 1478 - protein, 258 aa, Kosakonia cowanii
MRMNAKELIADARVTSPTLPPAAAKLMTAMADRLDVQFVALCESRSEAKHLAGENAVMKSAIKTHSESVHFCVGCGQDDPCSNDDICHVLEETPATDAFLANQCAETVDSAVGLLRILFNHQAPVLENVTSALQAFAAQLRCKSVAPSRFDQPPVRPSITALTVERNQYGYWTHPVYEEFCDGREYISNEEFNVWMKGNGLEWKVDYRDEEALDPEVDGYDLSTWQPEAPAGEGWFVGSIHDTDDGAVCIWLRNKAGE

SEQ ID NO: 1479 - protein, 486 aa, Kosakonia cowanii
MIYTTGSIAVSGNTLTGTGTNFTAAGSLIRNGCTVLALTSPAQAFQITSVDSATGLTVTPAASPSVPAGAKFAILLSDSLSVDGLAQDIAETFSMYQRYMGGFADVMNGSGDVTITINGQPVTVPGQKSLAKKGANTDITSLGGLTTALSIQQGGTGGKTAAEARNKIGAASSGNNSDITGITGLTTALSIQQGGTGAKDASQGWLNLLNGRTPASARGDLQLGTAAVRDAYSTTGAMLSVGDFGLGGKGSIRTWNDTAVVGYLRAGAASEFWRNNADTGHTYAGGCCLYTVSFDSFFNICVGQRGQGVRISSGTTDAVSLQVYTVYTDKNTSKASDGTLKAASPVARIVKSKKDCQRTDIDEEGFSWCGCGTANEEAEGISVSRLDTGVYTLTGSAGLASSGWQLLPPRDPQGSGDMGIVEAEQTESGGLTIRLYKRRYVLTDDGDIEVQKGAAIDVPVNSWIDVRLDMPETSLWNQRAAGTKEQ

SEQ ID NO: 1480 - protein, 1163 aa, Kosakonia cowanii
MATLRELIIKISADSSSFQSEITRASRMGSDYYRTMQAGGRQAAAAAKESERALSDLTNGFASAGKAAAAATAAFATGKLVQIADEWNSVNARLQQASASADDFATSQRQLMEISQRTGTAFSDNANLFARAAASMREYGYSSEEVLKITEAVSTGLKLSGASTQESSSVITQFSQALAQGVLRGEEFNAVNESGDRVIRALATGMGVARKDLKSMADQGKLTIDKVVPALMSQLGALQGEFATMPQTVSGSLQKVTNSFMGWVGGVNAATGATDALSGGLDGVAQTLDSFTSSAVSGALSDVADNMSVITTVAGALVGVGLAKYLSGIVTSATSATGALISAAKSEVALAVAQDRAAQSAVAASRADVYRAQQALQRAKGADVQAAQQEKIAAAEAKVTAAQSRLTTALAGGTATEKVRARAALERAQAGLTAAKNADVQAVAERRLAQAEAARDRNLANRVSTQSNLNSVTAVGSRLMSSALGVIGGIPGLVMLGAGAWYAAYQNQEQARRSAQEYGRTIDEISKKTRAMSLPEASDNSEKAKKALDEQNRLIDEQKSKIESLKEQIAGSQYLINNPGPTTKGGFMINHLTSLKTVTDDLSTATEQLSVEQERLSQMQEKAASIQQTLEGLQYRRVSLIREEAANQNSAYQSLLMMNGQHQTFNQLLGLGNQLLMARQGMTLAPLRVPQAEASQKQTDALEKSRRELALSRLKGEAKERARLGYAADELGLTADPQFQTNRLEYINNGLEEWRNNEANKKQPKGPKTDEEKAADAYKRMIKQQKEQIALQGQSTELARVKYQVVEGELSTLDKAQKAELMRNAALIDQVKLREQLRNYEANLADSNASARAANDAQLIGYGQGTRFRERMQEQFNIRKEFEQKNTDLLRQRQAGDIDETFYQQGLALNKRYLEERLRDQEGYYTASDAQRGDWLTGMSEGYANWVDEATDYSAMAADGMKQAMGGAVTTITDMLNGNLDSWKDWGMNVLKIIETVLVNMMVANAASSLGSLFSFGASSAATASSGTAIQSAASNFTFNAKGGVYDSPSLSAYSGGVYQTPQLFAFAKGAGVFGEAGPEAIMPLTRAADGSLGVRAVGAPQFSGGGPSVSFGDININGGAQSTAGQGAAATAGRQLKDAIVTVINEQASMPGSPLWRLLKGA

SEQ ID NO: 1481 - protein, 1267 aa, Kosakonia cowanii
MTNTAIKGRKGGSTKTRTPVEAPDSIQSIARAKILVALGEGEFAGGLDGRSIYLGDASSYTPLQNADGSYNFNNVKYEFRSGTQDQTYIQGFPGVENELQVAYKLKAAVPYVRSVSNTQLSALRIRLGWPSLLNQKDNGDKVGTRVEYAIELSVDGGAYAPVVKGAVDDKTTTLYERSHRIDLPKATTGWQLRVRRITPDSTTVNVVDSMRVEAVTEIIDAKLRYPNTALLYIEFDAKQFPNGIPQVVCNPKGRIIRVPDTYDPETRSYSGTWEGGFKWAWTDNPAWIYYDIVLNERFGLGQRIDATQIDKWELYRIAQYCDQPVPDGKGGSGTEPRFRCNVYIQERNDAWTVLRDLAGIFRGMTYWGDNKLYVLADMPRDIWHIYNHASVVDGKFTFADPSETTRNTAALVNWSDPANHYKDTPEVVYDNDLAMRFDYSQLELTAIGCTRQSEANRRGRWALLTNGIGEVVTFSTGMDVPPVGEVIGVAANELAGRVIGGRVSAVSGRNITLDRAADVKAGNRLFLNLPSGVAQARTVQAVNGNIVTVTTAYSETPEAECCWGVDADDLFIALFRVTGTRNNDDGTFEVTGATYSPDIYAAVDTGARLDERPVSVIPPGVQAPPENIVIDSYSTISQNIAVTTMRVAWDSVKGAIAYEAEWRRDSGNWVSVPRTSSFGFEVPGIYAGRYLVRVRAVNASDVSSIWATSAEVTLTGKVGNPPKPVGFIASENVVFGVELNWGFPANTDDTLKTEIQYSLTGSDDDAMLLADVPYPLRKYQQMGLKAGQVFWYRAQLVDRTGNESGYTDWIRGQSSSDVTDITEAVLEQIKDTDLFKDLIENAVESSQAVADLAEAVKQNADGLAAAAGANRQTAEAIIGNALAIADVVVRQSAQQGANSARFEQLREVIATETEARVTDVIRLEAKTDQNTAGITEVRQALANETEARATAVDQLTAQTEENKASITELTQTVTDLDSSTASRFEEISAEIAGIDGNEIRGGIQSNSIALITTTLAQVNDRTRLSVQYGDNKAGIERVDNVMADASQAVAESLRSMDASSGAGTANTTDFSKTMADFSQVSATKINSLTVTVNGQQAAIVQNAQVSADINNNLNAMYSIKVGVDAQGRQYAAGMGIGVQNSPAGMQSQVIFLADRFAVMSQAGGTVSLPFVIQNGQTFINDGFFRDASIQFGKITDSLKSDNYAAGAAGWNLPKSGNAEFNQVTVRGAIYATNGNFNLTGPGNTTVINGLGVTVNLANGGLIRLGSW

SEQ ID NO: 1482 - protein, 369 aa, Kosakonia cowanii
MLRLNPATLAICLLPLAIVACGDNGNSDDPRTQPPLVRTAPVMSAVDNARAFTGTVVARIQSDLGFRVPGKVLERLVDTGQTVTRGQPLMRLDPADLSLQAVSAAQAVSAAQARVRQAASDEARYRSLVTTGAVSASAYDQVKAAAETARADLKAAQAQASVAQNAMHYAVLLADGDGVVMATLAEPGQVVSAGQAVVRLARSGQREAIVQLPETLRPSLGSRAQATLYGRAGQAVPATLRLLSDAADPLTRTFEARYVLQGALASAPLGATVTLNITEGLSAKPLLQVPLAAVYDAGKGPGVWEVSGKPARVSWQPVEVVNITDDAARVMGNLQPGEPVVALGAHLLHEGEAVRQAKQSDSEIAGSRP

SEQ ID NO: 1483 - protein, 1028 aa, Kosakonia cowanii
MSGGSFNLSAIAVRERAITLFLIILITIAGSVSFLKLGRAEDPPFTVKQMTIISAWPGATAQEMQDQVAEPLEKRLQELQWYDRTETYTRPGLAFTMLSLQDSTPPSLVQEEFYQARKKVGDEAKNLPAGVIGPLVNDEFSDVTFALFALKAKGEPQRLLVRDAESLRQRLLHVPGIKKVNIIGEQAERIFISFSHDRLATLGISAQDIFAALNDQNVLTPAGSIDTRGPQVFIRLDGAFDTLEKIRQTPLVAQGRTLKLADVATVERGYEDPATFLVRNQGEPALLLGVVMREGWNGLALGEALDKEAASINAGMPLGMSLTKVTDQSVNISSAVDEFMIKFFVALLVVMVVCFLSMGWRVGVVVAAAVPLTLAVVFVIMEATGKNFDRITLGSLILALGLLVDDAIIAIEMMVVKMEEGYDRIKASAYAWSHTAAPMLAGTLVTAIGFMPNGFAHSTAGEYTSNMFWIVGIALIASWVVAVVFTPYLGVKMLPAIKPIEGGHAAIYNTRRYNQFRGLLARVIAAKWLVAGSVVVLFTVAILGMGLVKKQFFPTSDRPEVLVEVQMPYATSIAQTSATTAKIEAWLRQQKEAEIVTSYIGQGSPRFYLAMAPELPDPSFAKIVVRTGSQQAREALKFRLRHAVADGLAPEARVRVTQLVFGPYSPYPVAFRVMGPDPQVLRDIADKVKTVMQASPMMRTVNTDWGARVPTLHFTLDQDRLQAVGLTSSAAARQLQFLLTGVPITSVRENIRAVEVIGRAAGDIRLDPGKIAGFTLVGSAGQRIPLSQVGEAEVRMEEPLLRRRDRVPTITVRGDIAESLQPPDVSTAMMQQLQPVIAALPDGYQIEQAGSIEESGKATKAMAPLFPIMIAMTLLIIILQVRSLSAMVMVFMTAPLGLVGVVPTLLLFHQPFGINALVGLIALSGILMRNTLILIGQIHHNEREGLAPFDAVIEATVQRARPVLLTALAAILAFIPLTHSVFWGTLAYTLIGGTLGGTIITLVFLPAMYAIWYRINRPDPHEAKRAVG

SEQ ID NO: 1484 - protein, 243 aa, Kosakonia cowanii
MNKTIMSAIRAHALEESPRECCGFVIQSGRRQRYIPVPNTHENPTEHFRINGEFWANAEDIGTIIRVIHSHPGDGARPIPSDLDRQQCNNSGVVWGIYAPDSDEYAEIMPEAVPLIGRPFILGSHDCWGLIMDWHATQGVTLDDFRVDYPWWESQYPDNFYFDNWEQEGFIECDPAPGCMVIMQVESDKWNHAGIITEEGELLHHLYGQPSCITPYARGYFKDRTMICVRHRSLPEEIKPWRV

SEQ ID NO: 1485 - protein, 116 aa, Kosakonia cowanii
MAVETYKWPAQLGAGAIEYSQTIRASQFGDGYEQVAENGINSTAIQVPMIYVGKEELINEIRSFLLAHTVKAFIITPPGEEKGLYRVVADSVRKNQISSNAAELTFTIKRAYGVYA

SEQ ID NO: 1486 - protein, 83 aa, Kosakonia cowanii
MKMINAAAVVLVSLMASGCASNTPPLCYNEAVVMKNRVSVPVFGIRKPVSTTEYLSGGSFGYQWVERSAFTDTSACDRLPVTE

SEQ ID NO: 1487 - protein, 150 aa, Kosakonia cowanii
MNPINFIKNYSHIIVIGLICVALWGLNARNAQLTATNERLEKLANSKDDQINDLRSKNDGLAASVGELVTAVRQQNQLMSQVTEQRAVTAQQNRKLQNEIKQYLETDKCAQSRVPDNAADRLRAAAKAAGGVPDNKPAANQPSGRTDLPH

SEQ ID NO: 1488 - protein, 225 aa, Kosakonia cowanii
MGFALPNGATVFVGSKLATPVAVTGVSNAAGAVFTVASGHGLAVGDVVLVSSGWALIDSLVARVTAQTTTSVTIGVINSTDTNFFPAGSGTGSLSKVAEWTEIPQITEVSQSGGDQQYTQIQFLADDRQRNLATYKAAKSQTFTVAHDSTLPIYAVLSAADRSGDTLPLRMYVPKAKETRYWSGKPSFDPQPTTAPNAVETVQPAFAIQSRDITFYKDAAPQAAA

SEQ ID NO: 1489 - protein, 202 aa, Kosakonia cowanii
MADNQSFMASINAFVSQAKERQEEVVRVIGIKILARLVQMSPVGNPEMWAVNQTAAAYNAAVAEHNSLLRQNPENLTKAGRLRPGRKVKDGMDIKAPPGYTGGRFRGNWQVSFDQRAVGETGRIDKAGHETLTAGNLVLEQFKVGTTAIYFCNNVPYAYRLEMGHSSQAPGGMVRITAAEFQRYFSEAVSEVKNDTGHHNGA

SEQ ID NO: 1490 - protein, 160 aa, Kosakonia cowanii
MIITDITSPAMNSYAGEGDLKAFADLRDITLPEKIAPLLIRAMDYLEGLDWAGWRSEPKQPLAWPRAGIELDGYELPAGEVPRLVVTAQCMLAIEAMDGDLLGSVREAAVKSERVEGAVTTTYAVADGEVFRPSYPAVMALLGELAGGRGYAVNAFAERA

SEQ ID NO: 1491 - protein, 229 aa, Kosakonia cowanii
MNQELFHAVQNRDGEMLARMAGSSREQAKVINSDAERMVDLLFSQLKQVFPASTQTNLRSEADERTAKQQWIATFAENGIRSREQLVAGMQKARASVSPFWPSPGQFVAWCREGKGLLGMSPADVMAEFWKWRKLVFKYPTSEQYPWSQPLLYHVCLELRRRGVDRQMNEKELLSEAGHLLAHWEKRVAEGKPIPPVRRMLAAPHQDRGPTPAEMLMAEYKCRQAQGRV

SEQ ID NO: 1492 - protein, 103 aa, Kosakonia cowanii
MTTKFQLQPKPTFKADVTIPRAGEDDGILTFTFRHKPVKELAALEEIEGKTAIDFLTEITESWALPDEFSRENLEMLLDNYPGAMKAIVGTYYRELTGNREKN

SEQ ID NO: 1493 - protein, 136 aa, Kosakonia cowanii
MIPDITTALEAMLGLWADGEGVRVVWDNIQFDPPDDGLYLISHDMPAQPYSIDMAGGCRVYPGVYQVTVVAPAGGGKSQARMLARRVAGLFPENQEIPGDGFTAWVTSPPAIYPGIPDGVSYSIPVSINYRADISA

SEQ ID NO: 1494 - protein, 116 aa, Kosakonia cowanii
MPVNYTRMKATSTRLLTENGAAYPVKRKGTVTVIGGVEHPEPDKTFTAIGVRTEYRPGEIDGTVIINGDMRIVFTADNELRTGDMVDVDGKWYRIEKPNPVNPGKLLLCYRAQLRA

SEQ ID NO: 1495 - protein, 72 aa, Kosakonia cowanii
MSALNKAIKAAGSARKLSIALGVTSMSVSHWKNRDHGIVPPNYIFPIFKMTGVTPHELRPDLYPNPTDGLPK

SEQ ID NO: 1496 - protein, 127 aa, Kosakonia cowanii
MRKEEPNLVLVERLTEITDRGVTKADMARIAGVTPQAVNGWFKKGVISKKSALAIADAVGISIAWLLGEDVGEKDGLKPDEQRLLELYRQLPEEEQQNMLRIFAIRLKELDELYERYMKGRIRSHGD

SEQ ID NO: 1497 - protein, 187 aa, Kosakonia cowanii
MQTLGFHDDSRGLSAPLRSNYQGVPRNNCKLNQIREAVKAWNRATPGSAQIHISQLVAKEWMARGGRGLLLAGSEHNTRQNFFRMINDPGPKNDKNLLQLIPIIIDVMASDNEQVARRFGLISGKTKAELIAEAMKECAEAKQAVLLSLPEHQKLKEVSEGIASLFRLMPEQTGTLMTIVTSMLGAV

SEQ ID NO: 1498 - protein, 117 aa, Kosakonia cowanii
MSESLNNKELIAVGHEFAKAMTSDTPIIEIAKMMSRLAERLDCTTAALRETAKQRDALAALQQQDITKVLDECSEYLDRDCIMETNGISYEVAAQREVGAKALHDALMDLSRKELTA

SEQ ID NO: 1499 - protein, 119 aa, Kosakonia cowanii
MKRMPDKDAGFWAGLIAWLYSHKTEWGYAGVAGMFSLLRSAYAQSSWSKRVLDAVSCSALAFFAAPTLQVVGGVLNWNVPDTAAQVFAVYIGYVGNDYISEKLRGWISRKTGDNSENQS

SEQ ID NO: 1500 - protein, 203 aa, Kosakonia cowanii
MAKKPRRKCANLSCRQWFNPIREGQVVCSFECASAIGKELTAKAREAAKQKELQRQRAEEKAGRQRRAARRKELKPIRHWVQMTQRAFNDWRREMLLTAGHGCISCGTKTAFAWHAGHYRTTAAAPQLRFNPDNIWLQCSACNVHKSGNIEAYRAALVELIGEKRVLALESNNETHRYTREELDGIRARARADLRVLKQQETA

SEQ ID NO: 1501 - protein, 198 aa, Kosakonia cowanii
MAQLQLIKHSSNILIPATPETSDFLQSKCKLGTVLVADFKQVRNPAFHRRFFALLNLGFEYWEPTGGAISSNERRLVTGYAKYLAMFGGSETALLDAAEQYLDRIADKRTGSISACKSFDAYRAWVTIESGHYDAIQLPDGTLRKHPRSIAFANMDETEFQQLYKAALDVLWRWILSKAFRDQREAENAAAQLLSFGG

SEQ ID NO: 1502 - protein, 87 aa, Kosakonia cowanii
MIAKKGVFVKESQVQGDWYDIVRRSDGKLVGSMPLESRNLVYIKNGMVSCRPLMEDEGIFNLSSGTRFLRRLGYRLEQPSDMMISTD

SEQ ID NO: 1503 - protein, 66 aa, Kosakonia cowanii
MKETWFYHLECTTEQAEELLALYRRRGVKVERSLNPDLITWTVSAQLPEGNHPPRPSRVWQSKAWG

SEQ ID NO: 1504 - protein, 66 aa, Kosakonia cowanii
MTFFIVWEAYTRDWQLMQKGSRFMSTDDPDIIDVDLADYVAYMAKALGIEEKYLVITSVQSLGFLN

SEQ ID NO: 1505 - protein, 107 aa, Kosakonia cowanii
MCNRLKPKQKAIVEFIETNGPATPRQIRKLLGCDIREAYDRLKRLGMAGIVKNIGKPKHPEYQLVQRWQEKIKQPKQRLPAAPSAADVCRQNWQGYEIHKIFGSARA

SEQ ID NO: 1506 - protein, 80 aa, Kosakonia cowanii
MPFSTLIKTITISNAVSGDFKFEIYQNEKALFHADISRKNPLGKWEQFRNKFRFSKALDVEEVIGRCKKLVDDQFVAVKE

SEQ ID NO: 1507 - protein, 54 aa, Kosakonia cowanii
MGTQWRTGMGGITGLDYNVLPWLMKLNGVEDEATALTDIRVMESAALKIMHQGA

SEQ ID NO: 1508 - protein, 42 aa, Kosakonia cowanii
MTGLKMVKAALVRQQRLSGAITDSNCEVIMTNAHLKHQAKGA

SEQ ID NO: 1509 - protein, 115 aa, Kosakonia cowanii
MNLPESVGPVPVVRTPDGYWCHPALTAFYRDRDCVPQAEYDHWLVSNGLEDTLVCLDTDDDTPAAQAYARNADISYWTPPVPAGEGWFTGAIFDDEDYGPACIWLRRREVPCDAG

SEQ ID NO: 1510 - protein, 988 aa, Kosakonia cowanii
ETQRATAAQENLLRSITDQAATVRASKADMAEYRAAQMGIAEEAAPVIARLREQERAVQQEAAQRQIAASQSRMLKQVIAELEAAERAEAAEAQRAQAVRDSFIRSLADQAVAIGKTRAELLEMKAAQLGVSQQAAPFIAKLREQETAWERGIISAGQYQQAMRQLPAQITDVFTSLASGMPIWLVAIQQGGQIKDSFGGIGNMLKALGGLITPVNVGLALLAGTATLLTVAYFKGSAENAEFNKQLILTGNYAGQTAGQLSALAKSLSGNGVTQYASASILAEVVGSGKFNADKFESVARAAIAMQQATGQAVSETIANFKKLYDDPTKASAELNSQMHYLTATQFEYISALERRGDKEAAGQTAADAYSKAEQQRSQQILDNLGLVERAANATRNALKGMWDELLNIGRPQAPQDMLKQMESQLAALEKNLLPERQRMGYGYSYDTSSQDQEYDNRRKAQLAAIASLKAQVSPMQQAITLQENLNGAITSGNKVNEDAIDAQQVINRYLDAGTTAADKRRKAQEELNKAIADNAKAARDGTAKLWTPEEVAKARAGIEKLYQDPKTPKAKGVTVTAGDRAEDSAQAELLALQAQLRTLQDHRSINDIISQQRKDLYATESKFAVLEEASRTRRLSKQERSLLASKDQVLQLARQKALLGDQITAQEQLNKRMDTAQKYVTQMVEKQAGLASGATMSDRLAGRQASLSQLRSGWLNAGGGLNDDGYKRELKAANDYYAAEDKLRGEWMAGARKGWAEYLDAATNVYGSMQSVAQSALGGISDMLTNLVTTGTASFKSFAASMMKMIADVINRLLVAYTVQAAMGWISAGTSSVGSGAGQSFAVPSFRPAWNGGYIPEFDTGGYTGDGGKYQPKGVVHGGEFVFTKEATAAIGVNNLYAMMRGAQGYAEGGVVGRAPMLGLISGSGNAAPVINTTVNVDASGNASAQSSSSGDAMGRAMAAEIQNAATLVVQKHLKPGGMIYNFTKGR

SEQ ID NO: 1511 - protein, 112 aa, Kosakonia cowanii
ITTADVMAEYWKWRKLVFRYPSSEQYPWPKTLYYHICLELRRRGTDGQLCQKELEREASDILDMWEKRVIAGKPIPPVRRALAAPVASNEPTPAELLKAKYERMKSGGRAER

SEQ ID NO: 1512 - protein, 235 aa, Kosakonia cowanii
GGGTEITPEIQKLIDDQVAAQVNGLKTKNSELLGTIKQQKDNLSRFEGIDPDAVRGILQRFSDDEEAKLIAAGKIDEVLDKRTERLRADVDKQIKAANERADKAEAFSGKFRDRVLGDAIRAAASKAGALPEASDDLILRAKGTFQLNDEGEAVAVDGNGDVLFGKDGKTPLSPLEWAESLKETAPHLFPRAEGTGAGGHKPGGGGSQKRSEMSASDKADYIRKHGQQAFLKLPK

SEQ ID NO: 1513 - protein, 160 aa, Kosakonia cowanii
FENCQITIRRASNDGLIVSGGDKKKVEHILQKTWRARTSGFVNRVNFTGAVSKSIAVCVPLAVPDYCLPRQYVALGEIVCSADAFNADDQWYDVVRRADKAVIYSFPAEGRYLVYRVNGIVSLRPLLEEEEIFTLNGFSQFAKRLGYRVTPPSDMMISTD

SEQ ID NO: 1514 - protein, 71 aa, Kosakonia cowanii
MSALDKAIKAAGSARKLSIALGVTSMSVSHWKNRDHGIVPPSYIFSIFKMTGVTPHELRPDLYPNPTDGLP

SEQ ID NO: 1515 - protein, 47 aa, Kosakonia cowanii
MRKEEPNLVLVKRLTEITDRGVTKADMARIAGVTPQAVNGWFKKGVI

SEQ ID NO: 1516 - protein, 430 aa, Kosakonia cowanii
MIYTTGSIAVSGNTLTGTGTNFTAAGSLIRNGCTVLALTSPAQAFQITSVDSATSLTVSPAASPAVPAGTKFAILLSDSLSVDGLAQDIAETFSMYQRYMGGFSDVMNGSGDVTITINGTPVTVPGQKSLVQKGANTDITSLGGLTTALSIQQGGTGKKNKDEARMALSAASSGDNTDITSLGGLTTALSIQQGGTGGKTAAEARNKIGAASSGDNSDITGMTGITASLSGAGGQPAGGIITNKVTNSSSTSYVAKGMTVTYGTGAWTMYATFGALLDGSGVPGSCGPYIGTYDSNQFGTFWYFLQGSGVIRTNSGSLTPAVSDIRVKNEKQIVQEDEAVSFIRDWESIFYTLKWSPDKVRIGFRAQDIYARNPALIERIPLSDGEGGMLEDGMTVDVAEVATGYLVPVVRKLLREVAELRAKIEHLEGS

SEQ ID NO: 1517 - protein, 243 aa, Kosakonia cowanii
MNKAIMAAIRAHALEESPRECCGFVIQSGRRQRYIPVSNTHENPTQHFRIDGEFWANAEDIGTIIRVIHSHPGDGARPIPSDLDRQQCNNSGVVWGIYAPDSDEYAEIMPEAVPLIGRPFILGSHDCWGLIMDWHATQGITLNDFRVDYPWWESQYPDNLYFENWEPEGFVECAPSPGCMVIMQVESDKWNHAGIITEKGELLHHLYGQPSCITPYTRGYFKDRTMICVRHKDLPQEIKPWHV

SEQ ID NO: 1518 - protein, 116 aa, Kosakonia cowanii
MAVETYKWPVQLGAGSIEYNQTIRASQFGDGYEQVAENGINSTAIQVPMIYVGKEELINEIRSFLLAHTVKAFIITPPGEEKGLYRVVADSVRKNQISSNAAELTFTIKRAYGVYA

SEQ ID NO: 1519 - protein, 1260 aa, Kosakonia cowanii
METITGSKGGSQKQHTPVEQPDSAQSMARCRLLLALGEGEFAGGLDASRIFLDGTPLGNADGTMNFEDVSWDFRSGTQTQMPIPGFPAVENESKVGVSLTKATPWARALSNTQIDAVLIRIGIPGLQQQQNNGDIVGTTVKYHIDLAVDGGAFSPVMTRTVTEKLSSLYELTHRINLPKATTGWQIRVVRDTDDSTSQLLQNKTQVQAITEVIDARLRYPHTALLYVSFNAKSFSNIPKISCKPKGRIIRIPSNYDPIARTYSGTWDGTFKWGWSNNPAWIWFDVLTEPRFGLGRRITADMLDKWELYRIAQRCDQKVPDGKGGSGTEPRFMFDVYIQSQADAWQVIKDIAAGFNGMTFWGNNMFNVVSDMPADTSKLQILNRAAVIGKPVYSSGSEKTRFSSALINFSDPDNHYQDRTTAVMFPDLVKQFKFKQTQITAIGCTRESEAQRRGGWAVYSNSLDRIITLQTGLDGYVYVPGTVFAFADERLSGRVYGGRVAGYNGGLKAVTTDRGTSAVAGDTLMIRTQGGTVESRVIQAVNGTQLVVSTPFKADPLPNAVFVIDAGQLRLQYFRVTNLTFNDEENTYSITGAEYNSSKYDAVDNNARLDTPPISLIPTGLVNQPTNIRVSSFESVRQGQRITTLIASWDAPLDKNGKPQADVISYQVQWKRGDNDWINVPETGLRNIEVPGIFEGDYLVRVRAINSGGASSLWASSLLTHLKGRVGDVPKPVGLSASEDVVFGINITWGFPADTADTLSTELQYSLATDGTNPMLLAAVPYPQKLYQQMGLKAGQEFWYRARLVDRTGNQSAYTDWVRGQSSSDVTDITEAVLAQIKDTELFKDLIENAVDSSAKVAELAEAVRQNADGLAAATGSNKQMAEAIIGNALAIADVVVRQSAQQGANSAKFEQLREVIATETEARVTDVIRLEAKTDQNAAGITEVRQALANETEARATAVDQLTAQTEENRASVTALTQTVTDLDSSTASRFEEISAEIAGIDGSDIRGGIQSNSIALITTTLAQVNDRTRLSVQYGDNKAGIERVDNVMADASQAVAESLRSMDASSGAGTANTTDFAKTMADFSQVSATKINSLSVTVNGQSAAITQASQAVADLSGNLNAMYSIKVGVDANGRQYAAGMGIGVQNTPAGMQSQVLFLADRFAVMTQAGGTVSLPFLVQNGQTFINEAFINYASITLARVGSWYSANYVAGQTGTIMKADGTFEVNGAVSGQGRMQITNNRIISYDAQNRPAAVMGQRL

SEQ ID NO: 1520 - protein, 257 aa, Kosakonia cowanii
MTALIDTAAMLAPGGKVRLVEVDASEFSGGIHRFHYSPFPHTPREIDEAQGDESKLGPKPVVFDGKVYDFWPFQLTGLALSTDQAAEPSLSVSNLDGHITALCLQFKDMVNAKVSIIETYTVYLDAVNFPGRINPTADPTMFTLQTFWLDTKTSEDDEVVTWGLSSPADLQGLVIPTRQITSLCEWALRGQYRSGDGCTYNGTAYFDANGNPVSDPALDFCGGCFSDCRKRFGAGLAEPQSAILDFGGFPATVLFSR

SEQ ID NO: 1521 - protein, 199 aa, Kosakonia cowanii
MARLTTIRLYGSLGARFGRVHKLAVQTSAEAVKALCVNFDGLEGYLMNAKKNGMTFAVFRGKRNIGVQDFKGLAGDSDIRIAPIMEGAKKAGMFQTILGAVMVVAGVIVGVATGWTGVGLTFGAGLILSGASMMAGGLYQMLSPQPKGLQGRDDPDNKPSYAFGGSVNTLAMGNPVALLYGEREIGGAIISAGVVAEDI

SEQ ID NO: 1522 - protein, 267 aa, Kosakonia cowanii
MKLESSLKHFSPQGMNISDSVRGTSPDRLTGTDVMAAIGTTSSRARFGLAAFFGKAGISKTDEQIAVQALVRHAMEVAPKNVRKAAGGELGWCMQVLAQFAFAEYARSAASSSTCTTCGGTGFFSRREDVIKHPGIFDADGVELIAPKIKNELVKHACTACGGKGIIPARCRCGGKGEVLDRVATKERGAPVFKTCERCSGNGFSSVPSTAAHKTIIRRLPDLHVRTWTRNWKPFLESLVGICQQEEAKAEKEFQNATSFNEEENKI

SEQ ID NO: 1523 - protein, 83 aa, Kosakonia cowanii
MKIINAAAVVLVSLMASGCASNTPPLCYNEAVVMKNRVSVPVFGIRKPVSATEYLSGGSFGYQWVERSAFTDTSACDRLPLTE

SEQ ID NO: 1524 - protein, 317 aa, Kosakonia cowanii
MQMFIAGTSFDAINSMAASYVLDVITITGTGSKTYSLSGVSLTYAIVNDFMGGQLTGATYSVSVSGLTVSWNVNNAVTLVVYGSPVAGTQSDYFGFQLFQYINGVRTVKLAPNYVPLCLRQIIDVPAGARTVQTQVPAGNPVMCFHRHTGEAMDLCWWKPVTASGYHALQFPTAGSNQTGCRVYVFSNILANIPNYGFFLYRDGQMVWHSNCLPLQVIPLTNGDITSATPLAVTSSVTSHIFVPQDPAYPTGYSNFMCASAGKDGATYKVQVGKVFQSTYISNPDEGRRMRGWACGGVGYIDTRFYDQYYKNALGIT

SEQ ID NO: 1525 - protein, 119 aa, Kosakonia cowanii
MKHMPDKDAGFWAGLIAWLYSHKTEWGYAGVAGMFSLLRSAYAQSSWSKRVLDAVSCSALAFFAAPTLQVVGGVLNWNVPDTAAQVFAVYIGYVGNDYISEKLRGWISRRTGDNSENQS

SEQ ID NO: 1526 - protein, 335 aa, Kosakonia cowanii
MAKPDWGELQQRFLSDHAATGVSPKDWCEAQGLNYATARRHIKKPTAQIAQKTAQKKVRNAQKEIDVNALVENDGLTAQQRIFVAEYLKDRNATQAAIRAGYSAKTAEQIGYQLLQKTSVAAAIEKQQKASLVRTLASADEVLAQMWQLATFDANELSQYRRGSCRYCHGFGHNYQWRDMVEFEEHRLKAIEKKGKEPVDIGGYGYDHNREPNPACPRCNGDGIGQPYFADTRKLPPVSRLAYSGIKLGKNGVEITAISRERMYEAVMKRLGLADSEFAQQLQQIEIERRQLEVERLRKELAADPEDEVPIPVAININVADARVRKDDDGDIADP

SEQ ID NO: 1527 - protein, 150 aa, Kosakonia cowanii
MNPINFIKNYSHIIVIGLICIALWGLNARNAQLTATNERLEKLANSKDDQINDLRSKNDGLAASVGELVTAVRQQNQVMSQVTEQRAVTAQQNRKLQNEIKQYLEADKCAQSRVPDNAADRLRAAAKAAGGVPDNKPAANQPAGRADLPH

SEQ ID NO: 1528 - protein, 203 aa, Kosakonia cowanii
MANKHRRKCANLSCRQWFNPVREGQVVCSFECASAIGKEQTAKARDAAKQKELQRQRAEEKAGRQRRAARRKELKPIRHWVQMTQRAFNDWRREMLLAAGHGCISCGTKTAFAWHAGHYRTTAAAPQLRFNPDNIWLQCSACNVHKSGNIEAYRAALVELIGEERVLALESNNETHRYTREELDGIRAKARADLRVLKQQEAA

SEQ ID NO: 1529 - protein, 1129 aa, Kosakonia cowanii
MEFFYLIRATQKSGKPDGVIWFSAKTEARAALTLDVNLEDTRIETGRGKDYAKPIRTDFPVVNDLPEEGVVDFTWCDRYQLADDQRTWNVIPGAAPQDETDLAPSSTINDVALPAAPVTDTVDAGNTSQLENRTPSVRLAVHLLGDKYHSEISQEQQIVANELAMDEANVYFQNLLQAKNEVPDMSELSLHAEWKLVQAIKDVFPQHKEHEPALLAAFMSSWVKAEVSDRAQLIEDWLGGKLPVLELITTSDLGDDAPISNAEDQQDATPEEIAQAHVQAFRDRDITELHAVPTLSFRHRLLAQFITEKEYAYHIDNEQLNTVRQLEMDTDNSYVQNLLLAAENVEGMKNLRDFEFWRLTDAVKRVFPSDKATPDLSLMLQFMKAWKTTDYIDRGLLAKEWINGNRVSTIQRTDTGTNAGGGIKTDRNADYEHTLDTLDIEIACATLPMDFDIYNIPGSIHRRAKDIVAAKESPWKEWSAALRKTAGILDYSRAAIFALIREASSGITTFPDRMTGYISATLNEYKHDTPEARILAAARQIDSAAVDAGVIHCTEPSHQLVATHQPEVSNLGGGIFSIDGLLDEKANPVINTPSNEVEKQEVEIVGSVQMEETDPSKVEAGNALPAVEVANEAAAQTISVSPADILAAATPEMTRNVAPVLDQNIDALSQDEPELPPTEPEMTEIEPVADISEPEAAAKEWPAYFEPGRYEGLPNDVYHAANGISSTQVKDARVSLMYFEARHVSKTIQKERSKVLDMGNLVHALALQPETLAAEFSIEPEIPEGALTTTATIRECIDEYNASLPSQLSADDIKALLEAHNATLPTPLPLGAAVDETAESYMALPEEFQRIEADKKQTAAAMKACIKEYNATLPAPVKTSGSRDALLEQLAIINPDLVAQEAQKPQPLKVSGTKADLIQAVKAVKPDAVFADELLDAWRENPEGKVLMTRQQLETALAIQKALHSHPTAGKLLQHPDRAVETSYFGIDEETGLEIRVRPDLELDVDGVRIGADLKTISMWNIKQSGLRAKLHREIIDRDYHLSAGMYMETASLDQFFWIFVNKDEGYHWIAIVEASQELVELGILEYRATMRAIANAFDTGEWPAPITTDYTDELTEYDLRRLEALRAA

SEQ ID NO: 1530 - protein, 89 aa, Kosakonia cowanii
MAKLLNLQEWAAGVYSSPPSLSTLRRWVREGKIYPAPELHGKEYKLRPDAIYVDPSKKNLRLKPQHLKIPSKGTLLERLQNAEASPLRR

SEQ ID NO: 1531 - protein, 54 aa, Kosakonia cowanii
MSTQWRTGMGGITGLDYNVLPWLMKLNGVEDEATALMDIRVMESAALKIVHQGA

SEQ ID NO: 1532 - protein, 225 aa, Kosakonia cowanii
MGFALPNGATVFVGSKLATPVAVTGVSNAAGAVFTVANDHGLAVGDVVLVSSGWALIDSLVARVTAQTTTSVTIGVINSTDTNFFPAGSGTGSLSKVVEWTEIPQITEVSQSGGDQQYTQIQFLADDRQRNLATYKAAKSQTFTVAHDSTLPIYAVLSAADRSGDTLPLRMYVPKAKETRYWSGKPSFDPQPTTAPNAVETVQPAFAIQSRDITFYKDAAPQAAA

SEQ ID NO: 1533 - protein, 202 aa, Kosakonia cowanii
MADNQAFMVSINAFVSQAKERQEEVVRVVGIKILARLVQMSPVGNPELWAVNQTAAAYNAAVAEHNSLLRQNPDNLTKAGRLRPGRKVKDGMDLKAPPGYTGGRFRGNWQVSFDARTTDETGRVDKAGHLTMAAGNVTLGLFKVGVRDIYFCNNVPYSYRLEMGHSSQAPGGMVRITAAEFQRYFSQAVSEVKNDTGHHNGA

SEQ ID NO: 1534 - protein, 160 aa, Kosakonia cowanii
MIITDITSPAMNSYAGEGDLKAFADLRDITLPEKIAPLLIRAMDYLEGLDWAGRRSEPKQPLAWPRAGIELDGYELPAGEVPRQVVTAQCMLAVEAMDGDLLGSVREAAVKSERVEGAVTTTYAVADGEVFRPSYPAVMALLGELAGGRGYAVNASAERA

SEQ ID NO: 1535 - protein, 103 aa, Kosakonia cowanii
MATKFQLQPKPTFKADVTIPRAGEDDGLLTFTFRHKPVSELAALEEIEGKTAIDFLTEITESWALPDEFSRENLEMLLDNYPGAMKAIVGTYYRELTGNREKN

SEQ ID NO: 1536 - protein, 136 aa, Kosakonia cowanii
MIPDITTALESMLGLWADGEGVRVAWDNIQFDPPGDGLYLISHDMPAQPYSIDMAGGCRVYPGVYQVTVVAPAGGGKSQARALAHRVAGLFPENQEIPGDGFTAWVTSQPAIYPGIADGVSYSIPVSINYRADISA

SEQ ID NO: 1537 - protein, 116 aa, Kosakonia cowanii
MPVNYTRMKATSTRLLTENGAAYPVKRKGTVTVIGGVEHREPDKTFTAIGVRTEYRPGEIDGTVIINGDMRIMFTADNELRTGDMVDVDGKWYRIEKPNPVNPGKLLLCYRAQLRA

SEQ ID NO: 1538 - protein, 468 aa, Kosakonia cowanii
MANNDITWVRPEHRAASAAWKKIRDFCKGAEAVKEPGNNYLPLLDSTDKSMRNRKRNEDYLQRAVFYAITGNTKIGLLGLAFRKDPTFSAPEKLSYLLKNADGAGTSIYQQSQLVTENVLEVARDGLYVDYAEGSGQAIILRYLAENIINWRTKRINGRDQLVLVVLKECVEQEDGYAFKDEVQYRELALEEGRFICRVWRRSADAGSAVYAVTSEYQPKPKGKDSWDEIPFTFVGAQNNDPTIDDSPLAALVEINHGHFRNSADYEDSVWFCGQVQPYMTGLDEGWRDHLEKKGVKIGSRSPLLLPREGNFGYAQAQPNMLAKEAMDSKRDYMVQLGARLIEQNAAVKTATQSSSEQTSSTSVLGICVSNVSEAYSLAIGWCAKYLGVGEQQAAYAINQEFIAKVAESGMVTAIVNAWQSGAIRDTDMVRALQKLDLINPADSPDDIIDELHNPNPTLIGGNNGNGK

SEQ ID NO: 1539 - protein, 317 aa, Kosakonia cowanii
MATTVNNDLVIYDDLAQTAFLERRQDNLEVFNTSSNGAILLDNELIEGDFRKRAFYKVGGSIESRDVNSTGKVNGKKIGAGEAVSVKAPWKYGPYETTEEAFKRRGRTVDEFSEVIGVDVADATLEGYVKYGLKALTAAIGANTDMVVTADIETDGKKTLTRGLRKYGDKFNRVVLFVMHSATYFDIVDEAIASKIYEEAGVVVYGGQPGTLGKPVLVTDTMDAAAILGLVAGAVTVTESQAPGFRSYDINDQENLAVGYRAEGTVNVELLGYSWDTAKGENPDLTAIGMAGNWKKHFTSNKSTAGVLIKLGAASGE

SEQ ID NO: 1540 - protein, 198 aa, Kosakonia cowanii
MAQLQLIKHSFNILIPATPETSDFLQSKCKLGTVLVADFKQVRNPAFHRGFFALLNLGFEYWEPTGGAISSNERRLVTGYAKYLASFGGSETALLDAAEQYLDRIADKRTGSISACKSFDAYRAWVTIESGHYDAIQLPDGTLRKHPRSIAFANMDETEFQQLYKAALDVLWRWILSRTFRDQREAENAAAQLLSFGG

SEQ ID NO: 1541 - protein, 372 aa, Kosakonia cowanii
MATVNETLRDEAIAHTVWISRYSTGVANRMVKLLNDSDAELVARLLLAMDSLPTSQFTVSRLESMLGSVRELNQQAITGMHTSLADELLQLAGHEAGYQLSLFDSLLPQRVKERYPLQSITPEQLYAAAMAQPFQGRLLSEWADNLEADRMARVVNAVRRGYLQGDTTETIARQVRGIASKGYKDGALQLSRTNAASITKTAVNHLAATARTNFAEANGDVLKGKQWLSTLDNKTTPTCIIRDRLRYTLDNKPFGHKVPYLQGPGKIHFCCRSTETLITKSWRELGIDSNELDEDTRASMDGQVPADTTYLDWLARQSPQRQDHILGPERGRMYRGGNLELENMFSDKGEWITLSQLHERSNKAYQQTKDVL

SEQ ID NO: 1542 - protein, 66 aa, Kosakonia cowanii
MKETWFYHMECTTEQAEELLAQYRRRGVKVERSLNPDLITWTVSAQLPEGNHPPRPSRVWQSKTWG

SEQ ID NO: 1543 - protein, 66 aa, Kosakonia cowanii
MTFFIVWEAYTRDWQLMQKGSRFMSTDDPDIIDVDLADYVADMSKVLDIEERFFVITSVQQLGVLK

SEQ ID NO: 1544 - protein, 80 aa, Kosakonia cowanii
MSLSTLIKTITISNAVVGDFKFEIYQNEKALFHADISRKNSLGKWEQFRNKFKFSKALDVEEVIGRCRKLVDDQLLAMKE

SEQ ID NO: 1545 - protein, 360 aa, Kosakonia cowanii
MQRPARYDANLPRNLTFRKRDKLYSWRNPITGQVIYLGRIDRREAIAQAIEANSYLDQNYIPSSLLQRIKETPTLTMAKWLERYDVILERRELKPNTMKVRRNQLETIRKEFGTIALSAVTTKDIAEFLETYIACDKKSMAAGLRSVLLDVFREALVEGHIERNPAEPTRTPAPKVKRERLLLEAYFTIRETAAANSVWAANAFDLALVTAQRREDIAMMKFTDIREDRLFVIQEKTGNKLAIPLDLKLEAADLHLKEVIERCRVNNPSEFLLYSPVRRGGRKPGPLTPDGLTQAFSDTRDVTVLKFGPYPPSFHEIRSLASRLYEKEKGEEFAQRLLGHKNLSMTKKYLDSRGAEYVTV

SEQ ID NO: 1546 - protein, 358 aa, Kosakonia cowanii
MQNTNVAVADQNAVINSNIALFDSQYLNAISTFAQIMAQGAATVPKHLQGNQADCMAVAMQAAQWQMNPFAVAQKTHLINGVLGYEAQLVNAVISRSGVLANRFEYEWYGPWEKVVGKFHIRKGEKGEYRVPGWTMAEEAGIGIIIRATLKGEDHPRELDLLLAQARTRNSTLWADDPRQQLAYLAVKRWARLFCPDVILGVYTPDELEDRQEKEINLAPQQRVSVADIPAESTTNSAQESGTNIDGMADEFRDRIEVAQSVDQAKAVRVDIEAAKTTLGSALFTELKNKAVRRYYLVDARNKVEAAINSLPQPDEPDAAEQFTKAEQALAAAKRHLGDELYDQFAVTLLDMKPEYVA

SEQ ID NO: 1547 - protein, 436 aa, Kosakonia cowanii
MTGISPTLNVPQAQFLAMPHKFKAYVAGFGSGKTWVGCGGICKGMWEHPKINQGYFAPTYPQIRDIFYPTVEEVAFDWGLKVQINESNKEVHFYAGRQYRGTTICRSMEKPATIVGFKIGNALVDELDVMPALKAQQAWRKIIARMRYKVAGLRNGIDVTTTPEGYKFVYQQFVKAVRDKPELATLYGLVQASTFDNEANLPDDYIPSLLASYPPELIKAYLRGHFTNLTSGTIYHQFDRRLNNCTDEEQPGEPLFIGMDFNVGKMAAIVHVKREGLPRAVRELVKVYDTPAMIKRIQEEFWRYEGGRYVASRQIYIYPDASGDSRKSNCASLTDIAQLREAGFSVMVNASNPPVKDRINSMNAMFCNALGERRYLVNVQRCPVYTESLEQQVWDKNGEPDKKADNDHPNDGGGYFIVKDYPIVKPAYSITMDTTF

SEQ ID NO: 1548 - protein, 1124 aa, Kosakonia cowanii
MSDIATISLRVNTAELERGNKALDDFQQTAGGAANKADDLNSVFRAGASDQKKNTQSLKEQQQELQNLLNKISPVNRALDELDNLQESLSKFRKSGLVPDADYSRYNSVLETTREKLGRVMEAETAEGQERLKQAQETQRATAAQENFLRSITDQAATFRASKADMAEYRAAQMGIAEEAAPVIARLREQERAVQQEAAQRQIAASQSRMLKQVIAELEAAERAEAAEAQRAQAVRDSFIRSLADQAVAIGKTRAELLEMKAAQLGVSQQAAPFIAKLREQETAWERGIISAGQYQQAMRQLPAQITDVFTSLASGMPIWLVAIQQGGQIKDSFGGIGNMLKALGGLITPVNVGLALLAGTATLLTVAYFKGSAENAEFNKQLILTGNYAGQTAGQLSALAKSLSGNGVTQYASASILAEVVGSGKFNADKFESVARAAIAMQQATGQAVSETIANFKKLYDDPTKASAELNSQMHYLTATQFEYISALERRGDKEAAGQTAADAYSKAEQQRSQQILDNLGLVERAANATRNALKGMWDELLNIGRPQAPQDMLKQMESQLAALEKNLLPERQRMGYGYSYDTSSQDQEYDNRRKAQLAAIASLKAQVSPMQQAITLQENLNGAITSGNKVNEDAIDAQQVINRYLDAGTTAADKRRKAQEELNKAIADNAKAARDGTAKLWTPEEVAKARAGIEKLYQDPKTPKAKGVTVTAGDRAEDSAQAELLALQAQLRTLQDHRSINDIISQQRKDLYATESKFAVLEEASRTRRLSKQERSLLASKDQVLQLARQKALLGDQITAQEQLNKRMDTAQKYVTQMVEKQAGLASGATMSDRLAGRQASLSQLRSGWLNAGGGLNDDGYKRELKAANDYYAAEDKLRGEWMAGARKGWAEYLDAATNVYGSMQSVAQSALGGISDMLTNLVTTGTASFKSFAASMMKMIADVINRLLVAYTVQAAMGWISAGTSSVGSGAGQSFAVPSFRPAWNGGYIPEFDTGGYTGDGGKYQPKGVVHGGEFVFTKEATAAIGVNNLYAMMRGAQGYAEGGVVGRAPMLGLISGSGNAAPVINTTVNVDASGNASAQSSSSGDAMGRAMAAEIQNAATLVVQKHLKPGGMIYNFTKGR

SEQ ID NO: 1549 - protein, 230 aa, Kosakonia cowanii
MKKIAESIRNFDWEQARRVAHNMPEQYTEREQTQQVAQIINGLFVQLAAAFPASLVNRSQEDVNEIRRQWVLAFKENGITTMEQVEAGMRMVRRQVRPFLPSPGQFIKWCREGRCVLGITTADVMAEYWKWRKLVFRYPSSEQYPWPKTLYYHICLELRRRGTDGQLCQKELEREASDILDMWEKRVIAGKPIPPVRRALAAPVASNEPTPAELLKAKYERMKSGGRAER

SEQ ID NO: 1550 - protein, 256 aa, Kosakonia cowanii
MLIRNMLLKYYAPENDDQGGGGGGTEITPEIQKLIDDQVAAQVNGLKTKNSELLGTIKQQKDNLSRFEGIDPDAVRGILQRFSDDEEAKLIAAGKIDEVLDKRTERLRADVDKQIKAANERADKAEAFSGKFRDRVLGDAIRAAASKAGALPEASDDLILRAKGTFQLNDEGEAVAVDGNGDVLFGKDGKTPLSPLEWAESLKETAPHLFPRAEGTGAGGHKPGGGGSQKRSEMSASDKADYIRKHGQQAFLKLPK

SEQ ID NO: 1551 - protein, 285 aa, Kosakonia cowanii
MADLSNGYTKVANEIQQLKPRLRLSGREWQCFEAVIWLTYGWNKKQDRVTNTVIAELTGLSDSHVSDALKSLAERKIIFSQKQGVMKTVGINTDLSAWILDKPKTGKTFPKSGKVLPKTGKVFPETVDTQDYNKNNIKISSSRNSDESRNQKTQKFLSRHPEAAAGIYTPAGKSWGSADDLKAARWIYDRLLTVNASLSEPNWAEWANTIRLMRVQDKRTHYEICDLFQWANRDEFWKDNILSPSSLRKQWDQLTTKRLRTTGAAKSSRGGIDLHNTDWIDGVLE

SEQ ID NO: 1552 - protein, 67 aa, Kosakonia cowanii
MSHVYDLVRRADGKKVFSFPAGGRYLVDTSNGLQSMRPLMDDEIIFTVESAARFLKKIGYQVIPPAA

SEQ ID NO: 1553 - protein, 75 aa, Kosakonia cowanii
MSALDKAIKAAGSARKLSIALGVTSMSVSHWKNRDHGIVPPSYIFSIFKMTGVTPHELRPDLYPNPTDGLPKQEP

SEQ ID NO: 1554 - protein, 128 aa, Kosakonia cowanii
MRKEEPNLVLVKRLTEITDRGVTKADMARIAGVTPQAVNGWFKKGVISKKSALAIADAAGISVAWLLGEDVGEKDGLKPDEQRLLELYRQLPAEEQQNMLRIFALRLNELDELYARYMKGRIRSGDAS

SEQ ID NO: 1555 - protein, 488 aa, Kosakonia cowanii
MFPLNTLAVVVGACILTGCAVGPDYYRPEVPIAKHYHAQQALQQPTTSESASFSIWWENFGDPLLSRFVSDALTQNLDLAQASARMMQAQAGLGAATAALLPSGNISGQAARTYQSVETPLGQVLSSTPDYNRYGNSYEMDLNAGWEIDLFGGLRRGRQAALADYQASQAGVAATRLAVAAQTADIYITLRGLQSRLDIANKQVITQQQLLEKVQLLYSKGLASEYQVRQTEGALAQVKATVPVLNNGLDAAINALDVMLGAPPGTHHAQLASPGAIPHAPAITAMGTPADLLRRRPDIIVAERHLAASSARIGVAVSEYYPKFSLNALLGSATAVSGDNLFTAGASQSAGVLGLRWRLFDFGRINAQIKQAKGQEAEALAAYRLSVLRAAEDVENAFSALVNRQTQAATLTSGETALASARQSSFVAFQQGTASLIDVLHNDETLLQASDARAQAQTEAAHAAVAAFRALGGGWQSTLSEEIVNTPG

SEQ ID NO: 1556 - protein, 369 aa, Kosakonia cowanii
MFRLKPATFAVCLLPFALVACGDASDNSDPRSLPPLVRSAAAINATHSSRAFTGVVVARIQSDLGFRVQGKILERLVDTGQAVKRGQPLMRLDPLDLSLQAQAQQQAVAAAKARARQTADDESRYRGLVTTGAVSASAYDQIKAAADTARADLSAAQAQANVAQNAMSYAVLVADDDGVVMDTLAEPGQVVSAGQPVIRLARAGQREAVVQLPETLRPSPGSTAQASLYGSDKQPVSATLRLLSDAADPLTRTFEARYVLNGPLSGAPLGSTVTIHIAQGRTSQPLLQVPLAAVFDAGKGPGVWSISGNPARVAWRPVQVVSLGDDAASVTGSLKPGEQVVALGAHLLHDGETVRLAKQSDVSVAGSQP

SEQ ID NO: 1557 - protein, 1036 aa, Kosakonia cowanii
MSSGRFNLSALAVRERSVTLFLILLITVAGILSFLGLGRAEDPPFTVKQMTIISAWPGATAQEMQDQVAEPLEKRLQELKWYDRTETYTRPGLAFTMLSLQDSTPPSEVQEEFYQARKKLSDEARNLPAGVIGPMVNDEFSDVTFALFALKAKGEPQRLLVRDAESLRQRLLHVPGVKKVNIIGEQAERIFVSFSHDRLATLGISPQDIFAALNNQNVLTPAGSIDTRGPQVFIRLDGAFDKLEKIRETPVVSQGRTLKLSDVATVERGYEDPATFMVRNQSEPALLLGIVMREGWNGLDLGKALDKEAASINTDMPLGMTFTKVTDQSVNISSAVNEFMIKFFVALLVVMVVCFLSMGWRVGVVVAAAVPLTLAVVFVIMEASGKNFDRITLGSLILALGLLVDDAIIAIEMMVVKMEEGYDRIKASAYAWSHAAAPMLAGTLVTAVGFMPNGFAQSTAGEYTSNMFWIVGIALIASWVVAVVFTPYLGVKMLPDIKTVEGGHDAIYNTRRYNRFRQLLTRVIARKWLVAGSVVAVFTVAVLGMALVKKQFFPTSDRPEVLVEVQMPYGTSIEQTSAAVTKIEDWLRHQKEAKIVTAYIGQGSPRFYLAMAPELPDPSFAKIVVLTDSQEAREALKFRLRQAAADGLAPEARVRVTQLVFGPYSPYPVAFRVTGPDPTVLRDIADKVKTLMQASPLMRTVNTDWGSRVPTLHFNLNQDRLQAVGLTSNAVAQQLQFLLSGVPVTAVREDIRSVQVMGRAAGDIRLDPAKIADFTLVGSAGQRIPLSQAGEVEVRMEDPVLRRRDRMPTITVRGDIAESRQPPDVSTAIMKQLQPIITTLPDGYRIDEAGSIEESGKATKAMVPLFPIMIAMTLLIIILQVRSMSAMVMVFMTAPLGLVGVVPTLLLFNQPFGINALVGLIALSGILMRNTLILIGQIHHNEQEGLAPFHAVIEATVQRSRPVLLTAMAAILAFIPLTHSVFWGTLAYTLIGGTLGGTIITLVFLPAMYAIWFRIKRPDSTSSTEKHFSSEGLKNV

SEQ ID NO: 1558 - protein, 236 aa, Kosakonia cowanii
MRDKTISAILAHAAQAFPAECCGVVIQKGRVEKYVACRNLAASPEEQFELSPEDYAAAEEQGTVVAVVHSHPGDGATTQPSELDMLMCDATEVPWVIASWPEGDIRTIMPRGDRPLTGRQFVLGHADCWSLIRDYFRTKHDIELPDYSVDRHWWEEGENLYMDNWYACGFREFDGPQQPGDMVIMQVQASVPNHAGILLEGNMLLHHLYGQLSQRIPYGGYYRDRTIKVLRYKDLM

SEQ ID NO: 1559 - protein, 270 aa, Kosakonia cowanii
MRMNAKELIADARVTAPTLPPAAAKLMIAMADRLNVQFVALCESRNEAKQLAGENALMKSAIKTHSESVHFCVGCGKDDPCSNDDVCYALEETPTTDALLASLRAEGVEVLRQHPAIQLCSLTHVCDEVAAQLRSKSVSPAGVDQPPASPAITPLPVERNQYGYWTHPVYEEFCDGREYISNEDFNVWMKDNGLEWKVDYRDEEDIAPEVDGYDLSAWEPKAPAGEGWFVGSIHDTDDGAVCIWLRNKSEPSPETVAVARQFEQLKEAEK

SEQ ID NO: 1560 - protein, 439 aa, Kosakonia cowanii
MIYTTGSIEVSGNTLTGTGTNFSAAGSLIRTGCTVLALTSPAQAFQITAINGATSLTVTPAASPAVPAGTKFAILLSDSLSVDGLAQDIAETFTMYQRYMGGFSDVMTGTGDVTITINGQPVTVPAQKALAKKGANSDITSLTGLTTALSIEQGGTGGKTKAEARASLSVASSGANTDITSISGLTTPLAVSQGGTGATTESGVRQKIGAAASGRNSDISQISGLQIPVTSITSIPGDGSRGIFAESLSPANYDVVTKTLLSGLKTNNWSLYSSFGMYGGGSGTAAQAGPAVCVTDGGSFGARWFFRVNGSVISTANGDITPSVSDERVKNIIREITEEEAVAFITGVRPIRYALKWTPEQVKVGYSAQNIESLDPEIISTSALSVYNPDDGSTVTYEDGKILDPGEVGAAYLVPVVQQLLRRVSELEAAIKALNPHGS

SEQ ID NO: 1561 - protein, 236 aa, Kosakonia cowanii
MRDKTISSILEHAAQAFPAECCGVVIQKGRVEKYVACRNLATSPEEQFELSTEDYAAAEEQGTVVAVVHSHPGDGATTQPSELDMLMCDATEVPWVIASWPEGDIRTIMPRGDRPLTGRQFVLGHADCWSLIRDYFRTEHGIELPDYSVDRHWWEEGENLYMDNWYACGFREFDGLSRPGDMVIMQVQASVPNHAGVLLEGNMLLHHLYGQLSQRIPYGGYYRDRTIKVLRYKDLM

SEQ ID NO: 1562 - protein, 1163 aa, Kosakonia cowanii
MATLRELIIKISADSSSFQSEITRASRMGSDYYRTMQAGGRQAAAAAKESERALSDLTNGFASAGKAAAAATAAFATGRLVQIADEWNSVNARLQQASASANDFATSQRQLMDISQRTGTAFSDNANLFARAAASMREYGYSSEEVLKITEAVSTGLKLSGASTQESSSVITQFSQALAQGVLRGEEFNAVNESGDRVIRALATGMGVARKDLKSMADQGKLTIDKVVPALMSQLGALQGEFATMPQTVSGSLQKVTNSFMGWVGGVNAATGATDALSGGLDGVAQTLDSFTSSAVSGALSDVADNMSVITTVAGALVGVGLAKYLSGIVTSATSATGALISAAKSEVALAVAQDRAAQSAVAASRADVYRAQQALQRAKGADVQAAQQEKIAAAEAKVTATQSGLTTALAGGTATEKVRARAALERAQAGLAAAKNADVQAVAERRLAQAEAARDRNLANRVSTQSNLNSVTAVGSRLMSSALGIIGGIPGLVMLGAGAWYAAYQNQEQARRSAQEYGRTIDEISKKTRAMSLPEASDNSEKAKKALDEQNRLIDEQKSKIESLKEQIAGSQYLINNPGPTTKGGFMINHLTSLKTVTDDMSTATEQLSVEQERLSQMQEKAASIQQTLEGLQYRRVSLIREEAANQNSAYQSLLMMNGQHQTFNQLLGLGNQLLMARQGMTLAPLRVPQAEASQKQTDALEKSRRELALSRLKGEAKERARLGYAADELGLTADPQFQTNRLEYINNGLEEWRNNEANKKQPKGPKTDEEKAADAYKRMIKQQKEQIALQGQSTELARVKYQVVEGELSTLDKAQKAELMRNAALIDQVKLREQLRNYEANLADSNASARAANDAQLIGYGQGTRFRERMQEQFNIRKEFEQKNTDLLRQRQAGDIDETFYQQGLALNKGYLEERLRDQEGYYTASDAQRGDWLTGMSEGYANWVDEATDYSAMAADGMKQAMGGAVTTITDMLNGNLDSWKDWGMNVLKIIETVLVNMMVANAASSLGSLFSFGASSAATASSGTAIQSAASNFTFNAKGNVYDSPSLSAYSGGVYQTPQLFAFAKGAGVFGEAGPEAIMPLTRAADGSLGVRAVGAPQFSGGGPSVSFGDININGGAQSTAGQGAAATAGRQLKDAIVTVINEQATLPGSPLWRLLKGA

SEQ ID NO: 1563 - protein, 1253 aa, Kosakonia cowanii
MTNTVIKGRKGGGTKTRTPVEAPDSIQSIARAKILVALGEGEFAGGLDGRSIYLGDASSYTPLQNADGSFNFNNVKYEFRSGTQDQTYIQGFPGVENELQVAYELKQAVPYVRSVSNTQLSALRIRLGWPSLLNQKDNGDKVGTRVEYAIDLSVDGGTYVTVVNGAVDDKTTSLYERSHRIDLPKATTGWQLRVRRITPDSTTVNVVDSMRVEAVTEIIDAKLRYPNTALLYIEFDAKQFPNGIPQVVCNPKGRIIRVPDTYDPETRTYSGIWEGGFKWAWTDNPAWIYYDIVLNERFGLGQRIDATQIDKWELYRIAQYCDQLVPDGKGGSAMEPRFRCNVYIQERNDAWTVLRDLAGIFRGMTYWGDNKLYVLADMPRDIWHIYNHASVVDGKFTFADPSETTRNTAALVNWSDPANHYKDTPEVVYDNDLAMRFDYSQLEMTAIGCTRQSEANRRGRWALLTNGIGEVVTFSTGMDVPPVGEVIGVAANELAGRVIGGRVSAVSGRNITLDRAADVNAGNRLFLNLPSGVAQARTVQAVNGNTVTVTTAYSETPEAECCWGVDADDLFIALFRVTGTRDNDDGTFEVTGATYSPDIYAAVDTGARLDERPVSVIPPGVQAPPENIVIDSYSTISQNIAITTMRVAWDSVKGAIAYEAEWRRDSGNWVSVPHTSSLGFEVPGIYAGRYLVRVRAVNASDVSSIWATSAEVTLTGKVGNPPKPVGFTASETVVFGIELNWGFPANTDDTLKTEIQYSLTGSDGDAMLLADVPYPLRKYQQMGLKAGQVFWYRAQLVDRTGNESGYTDWVRGQSSSDVTDITEAVLEQIKDTELFKDLIENAVESSQAVADLAEAVKQNADGLAAAAGANHQTAEAIIGNALAIADVVVRQSAQQGANSARFEQLREVIATETEARVTDVIRLEAKTDQNAAGITEVRQALSNESEARASAVDELTAKTEKNAANVTVLNQTVTDLDSSTASRFEEISAEIAGIDGNEIRGGIQSNSIALITNTLAQVNTRTLLSVQYGDNKAGIQRVDNVMADASQAVAESLRTLDASAGGGTANATDFAKTMANFSQVSATKINSLSVTVNGQQAAIVQNSQAVADISGNLSAMYSIKVGVDAAGRQYAAGMGIGVQNTPAGMQSQVIFLADRFAVMSQAGGTVSLPFLVQNGQTFINEAFINYASITLGKVGSWYSANYVAGQTGTIMKADGTFEVNGAVSGQGRMQITNNRIISFDAQNRPAAVMGQRL

SEQ ID NO: 1564 - protein, 252 aa, Kosakonia cowanii
MSISSDVQKLEPGSRVRLIEVDGEAFGAGILRFHNETIPHTEAEIIAAGGDASKLPPKSVWWQGLEYGAWPFELTGLSVSSDGQSARPTLTVANISGTIGALCRRFQGMAKAKVIIHETFAHYLDARNFSGGNPGANPNEERKQVYYIDRKSSSDDETVEFELSSPADLRGQLIPTRQIQPMCTWCMRGWYKTGNGCTYAGQNGWFDKDGNRVDDPSKDVCSGLLSTGCKPRFGADNELDYGGFPGASLLRG

SEQ ID NO: 1565 - protein, 199 aa, Kosakonia cowanii
MEKRTVIKLSGSMAQRFGRTHRRALSSASEVFRALSSTVDGFEDYLREARARGLDFVIFRDRRNISQEEFSLLGPGDELRIIPVIRGSKRAGIFQAVLGVALIAGGIALGPAGAGLIGKGVALNVALVGASMALGGVVQLLSPQVAGMRMRQDPDNKPSYAFGGPVNTTASGNSVPLLYGQREIGGAIISAGIYAEDQQ

SEQ ID NO: 1566 - protein, 252 aa, Kosakonia cowanii
MNLESLPKFYSPKSPKLNDQTPASGGVALTITDVMAAQGMVQSKASLGFNLFLAKMGIQDPAPAIDGLMQYALALKNPVLGKLSEKARGEVLSVLVQFAYADYSRSAASKSTCPHCEGKGVVREMQDVVKHPGVNGVEAMVKHEAVEVMCQHCAGKGEVGTACRGCKGKGTVLDEKRTKLIGAPVSKVCSRCNGNRYSRLPTTLARARIEKIIPDLTSYQWYSGYGDVIALLVTKCWQEEAFAEAQLRKVTR

SEQ ID NO: 1567 - protein, 83 aa, Kosakonia cowanii
MKIINAAAVVLVSILAAGCASSTPPLCYNGAVVIKNRVSVPVFGIRKPVSTTEYLSGGSFGYQWVERSAFTDTSSCDRLPLTE

SEQ ID NO: 1568 - protein, 317 aa, Kosakonia cowanii
MQMFIAGTRFEAINVMAASYVLDVITITGTGSKTYSLPGVELTYAIVNDFMGGQLTGATYSVSVSGLTISWNVNNAVTLIVYGSPVAGTLSDYFGYQLFQYLNGVRTVKLAPNYVPLCLREIIDVPAGARTVQTQVPAGNPVMCFHRHTGAEMDICWWKPATANGYHALQFPTDGSNQTGCRVYVFSNILANIPDYGFYLYRDGQMVWHSNCLPLQVIPLTNGDITSNTPLAVSSSVTAHIFVPQDPVYPTGYSNFMCASAGNDGTRYKVQVGKVFQSTYISNPDEGRRMRGWACGGVGYIETQFYDQYYKYALGLA

SEQ ID NO: 1569 - protein, 176 aa, Kosakonia cowanii
QAFLPVFRTQQSGVVVNIASIGAEGGYPYTSVYSASKAAVLTISEALNVEMHPFGVQVKAVLPGQHATRIFSKIDGPDIKVDAYTAQIQAFFDHVPESGSEPSVVGDVVYTAATDGRTDKVHYYAGPDALAIPRMKRLLGIEDYWTEFQAFALGSPSPLWQTLNVPAGTAPLERII

SEQ ID NO: 1570 - protein, 189 aa, Kosakonia cowanii
MRMNAKELIADARVTAPTLPPAAAKLMIAMADRLDVQFVVLCESRNEAKQLAGENALMKSAIKTHSESVHFCVGCGKDDPCSNDDVCYALEETPATDAFLASLRAEARKQGAVFAANRMLAAWDAGFIEDTPENAADIARAILMSTEFMDEAPDGDFDRSFADEMLEAIASQLRSKSNVAAKTIAGESQ

SEQ ID NO: 1571 - protein, 487 aa, Kosakonia cowanii
MIYTTGSIAVSGNTLTGTGTNFTAAGSLIRNGCTVLALTSPAQAFQITSVDSATGLTVTPAASPAVPAGTKFAILLSDSLSVDGLAQDIAETFSMYQRYMGGFADVMSSSGDVTITINGQPVTVPGQQSVAKKGANSDITSLNGLTTVLSIQQGGTGGKTAAEARNKIGAASSGNNSDITSITGLTTALGIPQGGTGGKTAAEARTNLGLSDVATKTAGTAEGSVMLVGAMGTPTGGYKFYKTEGAIAPTLNWNDITLPGLFPNLIDASNSANSPTASGYYYAQVLVRGDSGAVQQIALPYATSASNPGRILYRGKNGNTWSSWAEFYTTANTTKASDGTVKAASPIARIAADRKTCLRTDISDDGFAWCGCGTANGEAEGITISRLDTGVYVIAGSAGLASSGWQLLPPRDPQGSGDLGIVEAEETESGGLTIRLYKRRYVLSEDGDIELQKGAAIDVPPTSWIDVRLEMPETSLWNQRAAGPQEQ

SEQ ID NO: 1572 - protein, 236 aa, Kosakonia cowanii
MRDKTISEILAHAAQAFPAECCGVVIQKGRVEKYIACRNLATSPEEQFELSPEDYAAAEEQGTVVAVVHSHPGDGATTQPSELDMLMCDATEVPWVIASWPEGDIRTIMPRGDRPLNGRQFVLGHADCWSLIRDYFRIEHNIDLPDYSVDRHWWEEGENLYMDNWHDCGFREFDGPQQPGDMVIMQVQASVPNHAGVLLEGNMLLHHLYGQLSQRIPYGGYYRDRTIKVLRYKDLM

SEQ ID NO: 1573 - protein, 112 aa, Kosakonia cowanii
MAVETFSWCPKVAAQVDTSFRTRKAQFGDNYAQVAGDGINPVTSQWSVSFTGDEAYVQAIKAFLKRHAGWKSFIWKPPLESAGLWRSESIQIATHGADLYTLSTTFIQAYHP

SEQ ID NO: 1574 - protein, 675 aa, Kosakonia cowanii
MGRALGLIGGVPGLVMLGAGAWYAMYQSQEQARQSAQEYARTIDQVSQKTRAMSLPEADENRGKTIDALVEENRLIGEQQKAISAVKRQIDELNKARAQPGITKDNDLNIVRALAILTDQLTVEENKLNLMREKSTSIQQVLEGIDRRRNDLIREQAWRQNAAYQSLLMMNGQHQRFNQLLGLGNQLLMARQGMTLAPLRVPQAEASQKQTEALEKSRRELALSRLKGEAKERARLGYAADELGLTADPQFQTNRLEYINNGLEEWRNNEANKKQPKGPKTDEEKAADAYKRMIKQQKEQIALQGQSTELARVKYQVVEGELSTLDKAQKAELMRNAALIDQVKLREQLRNYEANLADSNASARAANDAQLIGYGQGTRFRERMQEQFNIRKEFEQKNTDLLRQRQTGDIDETFYQQGLALNKRYLEERLRDQEGYYTASDAQRGDWLTGMSEGYANWVDEATDYSAMAADGMKQAMGGAVTTITDMLNGNLDSWKDWGMNVLKIIETVLVNMMVANAASSLGSLFSFGASSAATASSGTAIQSAASNFTFNAKGGVYDSPSLSAYSGGVYQTPQLFAFAKGAGVFGEAGPEAIMPLTRAADGSLGVRAVGAPQFSGGGPSVSFGDININGGAQSTAGQGAAASAGRQLKDAIVTVINEQASMPGSPLWRLLKGA

SEQ ID NO: 1575 - protein, 1267 aa, Kosakonia cowanii
MTNTAIKGRKGGGTKTRTPVEAPDSIQSIARAKILVALGEGEFAGGLDGRSIYLGDASSYTPLQNADGSYNFNNVKYEFRSGTQDQTYIQGFPGVENELQVAYELKAAVPYVRSVSNTQLSALRIRLGWPSLLNQKDNGDKVGTRVEYAIELSVDGGAYAPVVKGAVDDKTTTLYERSHRIDLPKATTGWQLRVRRITPDSTTVNVVDSMRVEAVTEIIDAKLRYPNTALLYIEFDAKQFPNGIPQVVCNPKGRIIRVPDTYDPDTRTYSGTWEGGFKWAWTDNPAWIYYDIVLNERFGLGQRIDATQIDKWELYRIAQYCDQPVPDGKGGSGTEPRFRCNVYIQERNDAWTVLRDLAGIFRGMTYWGDNKLYVLADMPRDVAHIYNHASVIDGKFTFADPSETTRNTAALVNWSDPANHYKDTPEVVYDNDLAMRFDYSQLELTAIGCTRQSEANRRGRWALLTNGIGEVVTFSTGMDVPPVGEVIGVAANELAGRVIGGRVSAVNGRNITLDRAADVKAGNRLFLNLPSGVAQARTVQAVNGNIVTVTTTYSEPPEAECCWGVDDDDLFIALFRVTGTRNNDDGTFEVTGATYNPDIYAAVDTGARLDERPVSVIPPGVQAPPENIVIDSYSTVSQNIAITTMRAAWKPVKGAIAYEAEWRRDSGNWVSVPRTSSQGFEVPGIYAGRYLVRVRAVNASDVSSIWATSAEVTLTGKVGNPPKPVGFTASENVVFGIELNWGFPANTDDTLKTEIQYSLTGSADDAMLLADVPYPLRKYQQMGLKAGQIFWYRAQLVDRTGNESGYTAWVRGQSSTDVTDITEAVLAQIKDTELFKDLIENAVESSKAVAELAEAVRQNADGLAEAAGANRQTAEAIIGNALAIADVVVRQSAQQGANSAKFEQLREVIATETEARVTDVIRLEAKTDQNAAGITEVRHALANETEARATAVDQLTAQTEENKASVTALTQTVTDLDSSTASRFEEISAEIAGIDGSDIRGGIQSNSIALITTTLAQVNDRTRLSVQYGDNKAGIERVDNVMADASQAVAESLRSLDASSGAGTANTTDFAKTMADFSQVSATKINSLSVTVNGQQAAIVQNAQVSADINNNLSAMYSIKVGVDANGRQYAAGMGIGVQNTPAGMQSQVLFLADRFAVMSQAGGTVSLPFVIQNGQTFINDAFFRDASIQFGKITDSLKSDNYAAGSAGWNLPKSGNAEFNQVTVRGAIYATNGNFNLTGPGNTTVINGLGVTVNLANGGLIRLGSW

SEQ ID NO: 1576 - protein, 199 aa, Kosakonia cowanii
MEKRTVIKLSGSMAQRFGRTHRRALSSASEVFRALSSTVDGFEDYLREARARGLDFVIFRDRRNIGQEEFSLLGPGDELRIIPVIRGSKRAGIFQAVLGVALIAGGIALGPAGAGLIGKGVALNVALVGASMALGGVVQLLSPQVAGMRMRQDPDNKPSYAFGGPVNTTASGNPVPLLYGQREIGGAVISAGIYAEDQQ

SEQ ID NO: 1577 - protein, 252 aa, Kosakonia cowanii
MNLESLPKFYSPKSPKLNDQTPATGGVALTITDVMAAQGMVQSKACLGFNLFLAKMGIQDPAPAIDGLMQYALALKNPVLGKLSEKARGEVLPVLVQFAYADYSRSAASKSTCPHCEGKGVVREMQDVVKHPGVKGIEATVKYEAVEVMCQHCAGKGEVGTACRGCKGKGTVLDEKRTKLLGAPVRKVCGRCNGSRFSRLPTTLARTRIERIIPDLTSYQWYSGYGDVIALLVTKCWQEEAFAEVQLLKVTR

SEQ ID NO: 1578 - protein, 375 aa, Kosakonia cowanii
MAARPRKNNVSVPNLYPLYSRKVNKVYWRYKHPITGKFHALGTDEAEAIAIATEANTRLAEQRSRQIMAISDKIASSKGKAITTNTWLDRYWNIQGERLDSGDIKLNTYKQKAKPVALLRERVGMKLISSVDVRDIAEILEAYISDGQPRMAQVIRSVLIDVFKEAQHYGEVPPGYNPALATKQPRRRITRQRLNLEEWQKIFDIADANHKYMGNAMLLALVTGQRLGDISNMKFSDIWDDHLHIVQEKTGSKIAIPLALRLKAINWSLREVVARCRDYAVSPYLVHFFRATSQAERGAQVKSNTLTMNFSKARDKANIEWGDGTPATFHEQRSLSERLYKEQGIDTRRLLGHKSQQQTDRYHDDRGKDWSKVNI

SEQ ID NO: 1579 - protein, 252 aa, Kosakonia cowanii
MSISSDVQKLEPGSRVRLIEVDGEAFGAGILRFHNETLPHTEAEIIAAGGDASKLQPKSVWWQGLEYGAWPFELTGLSVSSDGQSARPTLTVANISGTIGALCRRFQGMAKAKVIIHETFAHYLDARNFSGGNPAANPNEERKQVYYIDRKSSSDDETVEFELSSPADLRGQLIPTRQIQPMCTWCMRGWYKTGNGCTYAGQNGWFDKDGNRVDDPSKDVCSGLLSTGCKPRFGANNELDYGGFPGASLLRG

SEQ ID NO: 1580 - protein, 422 aa, Kosakonia cowanii
MIYTTGSIAVSGNTLTGTGTNFTAAGSLIRNGCTVLALTSPAQAFQITSVDSSTGLTVSPAASPAIPAGTKFAILLSDSLSVDGLAQDIAETFSMYQRYMGGFADVMNGSGDVTITINGQPVTVPGQKSLAKKGANADITSLNGLTTAITLAQGGTGAKTAAGARTSLGLGSMATQSSDAVNITGGSGTFTSLSSDAVAITGGTASLGTIETKAGAEQPLVIRTNPTSGLGYIRFRDASENPLAYLGFGASGAQHFILASNIGGNSVTLNTTGAVTVKAGGANYAFQTNGTATGQLWQSTSDVRIKKDIKPITNAREVISAINGYTFKKRYNLYEVAEPLYTEEAGILAQELELVAPEAVSKNDFGAHDLENNPIDDLRAVNYAGITPYLIELAKLHEAEISDLKGEVAQLKALVSSLAQGS

SEQ ID NO: 1581 - protein, 1238 aa, Kosakonia cowanii
MSDIATISLRVNTAELERGNKALDDFQQTASGAANKADDLNSVFRAGASDQKKNTQSLKEQQQELQNLLNKISPVNRAMDELETLQSKLAGFRGKGLLGNEDYSRFSAVLDTTRDKLFQVMEAETAEGQERLKLAQDTQRAAAAQDSFLNSLSEQAATFRASKSDVLEYRASILGLTQEAAPLIQQIRERELAIASEAVQTKLAAQELREKQAAERQALAEASRLQAQNDNFVESLRNQALAIGKSRAEVLELKAAQMGLLQEAGPYIAALKAQEAATAQEAANKKVSAMQSRMLRDAIAELEAAERAEASEMQRAQNIRDSFVRTLEEQATSIGKTRIELLEMKAAQLGVSQQAAPFIEKLREQDEAWKKGGISAGQYRQALRMLPAQFTDIATSIAGGMPLWMVLIQQGGQISDSFGGLGGLFQFIKEEVLGFKEATDDSSESLSENANSLAENAEHGRGMLAFLTPARVAVGGLVGVASLLAIAWYKGAQEASEFNKQLILTGNYAGKTAGQLSQLSRQIADDAGVTIGESSATLAKIVGSGRFDGNKLEVVARAAAAMEDAVGQSVDTTIANFQKLYDSPVKASIELNSQLHYLTAAEFQYISALERRGDKEEAGQKAADSYSRAEQQRSQQVIDNLGLIDQVIRGVSDTWKAYWDAALGIGRKESTAEQLEVVRQRIKEITNQSRPGVFGMGNVGDGGAAKRELAALLQQERELGFVIKSQEGFNQKRAEFNKINQDGIDAQISFNKYLDAGTTQAEKRALAQKDLNKAIADNAKAVKATQGLPYEQRVKPLTPEQISKARAGIEKLYKDPKIPKAKGITVAAGDRAEDSAQAELLALQAQLKTLQDHRSVNDKISQQRNDLYATESKFAVLEAAASTRQLSKQEKSLLASKSQVLQLAQQKALLGDQITAQEQLNRRMDTAQKYVTQMVEKQAGLASGATMSDRLAGRQASLSQLRSGWLNAGGGLNDDGYKRELKAANDYYAAEDKLRGDWMAGARKGWAEYLDAATNVYGSMQSVAQSALGGISDMLTNLVTTGTASFKSFAASMMKMIADVINRLLVAYTVQAAMGWISAGTSSAGSGAGQSFAVPSFRPAWNGGYIPEFDTGGYTGDGGKYQPKGVVHGGEFVFTKEATAAIGVNNLYAMMRGAQGYAEGGVVGRPPMLGLMSGSGNAAPVINTTVNVDASGNASAQSSSSGDAMGRAMAVEIQNAATLVVQKHLKPGGMIYNFTKGR

SEQ ID NO: 1582 - protein, 1260 aa, Kosakonia cowanii
METITGAKGGSQKQHTPVEQPDSAQSMARCRMLLALGEGEFAGGLDATRIFLDGTPLGNADGTMNFENVTWDFRPGTQTQTPIPGFAAVENETSIGVSLTKVAPWTRALSNIQIDAVLVRIGIPGLQQQQNNGDIVGTTVKYHIDLAVDGGAFSTVMTRTVTEKLSSLYELTHRINLPKATTGWQIRVVRDTDDSTSQLLQNKTQVQAITEVIDARLRYPHTALLYVSFNAKSFSNIPKISCKPKGRIIRIPSNYDPIARTYSGTWDGTFKWGWSNNPAWIWFDVLTEPRFGLGRRITADMLDKWELYRIAQRCDQKVPDGKGGSGTEPRFMFDVYIQSQADAWQVIKDIAAGFNGMTFWGNNMFNVVSDMPADTSKLQILNRAAVIGKPVYSSGSEKTRFSSALINFSDPDNHYQDRTTAVMFPDLVKQFKFKQTQITAIGCTRESEAQRRGGWAVYSNSLDRIITLQTGLDGYVYVPGTVFAFADERLSGRVYGGRVAAYNGGLKAVTTDRGTSAVAGDTLMIRTQGGTVESRVIQAVNGTQLVVSTPFKADPLPNAVFVIDAGQLRLQYFRVTNLTFNDEENTYSITGAEYNSSKYDAVDNNARLDTPPISLIPTGLVNQPTNIQVSSFESVRQGQRITTLIASWDAPLDKNGKPQADVISYQVQWKRGDNEWINVPETGLRNIEVPGIFEGDYLVRVRAINSGGASSLWASSLLTHLKGRVGDVPKPVGLSASEDVVFGINITWGFPADTADTLSTELQYSLATDGTNPMLLAAVPYPQKLYQQMGLKAGQEFWYRARLVDRTGNQSDYTDWIRGQSSSDVTDITEAVLAQIKDTELFKDLIENAVDSSAKVAELAEAVRQNADGLAAAAGSNKQMAEAIIGNALAIANVVVRQSAQQGANSAKFEQLREVIATETEARVTDVIRLEAKTDQNAAGITEVRQALANETEARATAVDQLTAQTEENRASVTELTQTVTDLDSSTASRFEEISAEIAGIDGSDIRGGIQSNSIALITTTLAQVNDRTRLSVQYGDNKAGIERVDNVMADASQAVAESLRSMDASSGAGTANTTDFAKIMADFSQVSATKINSLSVTVNGQQAAIVQNAQVSSDINNNLNAMYSIKVGVDAAGRQYAAGMGIGVQNTPAGMQSQVIFLADRFAVMSQAGGTVSLPFLVQNGQTFINEAFINYASITLARVGSWYSANYVAGQTGTIMKADGTFEVNGAVSGQGRMQITNNRIISYDAQNRPAAVMGQRL

SEQ ID NO: 1583 - protein, 257 aa, Kosakonia cowanii
MTALIDTAAMLAPGGKVRLVEVDASEFSGGIHRFHYSPFPHTPREIDEAQGDESKLGPKPVVFDGKVYDFWPFQLTGLALSTDQAAEPSLSVSNLDGHITALCLQFKDMVNAKVSIIDTYAVYLDAVNFPDHVNPTADPTMFTLQTFWLDTKTSEDDEVVTWGLSSPADLQGLVIPTRQITSLCEWALRGQYRSGDGCTYNGTAYFDAKGNPVADPALDVCGGCLSDCRKRFGAGLAEPNAAILDFGGFPATVLFTR

SEQ ID NO: 1584 - protein, 360 aa, Kosakonia cowanii
MQRPARYDANLPRNLTFRKRDKLYSWRNPITGQVIYLGRIDRREAIAQAIEANSYLDQNYIPSSLLQRIKETPTLTMAKWLERYDIILERRELKPNTMKVRRNQIETIRKEFGTIALSAVTTKDVAEFLETYIACDKKSMAAGLRSVLLDVFREALVEGHIERNPAEPTRTPAPKVKRERLLLEAYFTIRETAAANSVWAANAFDLALVTAQRREDIAMMKFTDIREDRLFVIQEKTGNKLAIPLDLKLEAADLHLKEVIERCRANNPSEFLLYSPVRRGGRKPGPLTPDRLTQAFSDTRDVTVLKFGPYPPSFHEIRSLASRLYEKEKGEEFAQRLLGHKNLSMTKKYLDSRGAEYVTV

SEQ ID NO: 1585 - protein, 317 aa, Kosakonia cowanii
MQMFIAGTSFDAINAMAASYVLDVITITGTGSKTYSLSGVSLTYAIVNDFMGGQLTGATYSVSVSGLTVSWNVNNAVTLIVYGSPVAGTQSDYFGFQLFQYINGARTVKLAPNYVPLCLRQIIDVPAGARTVQTQVPAGNPVMCFHRHSGEAMDLCWWKPVTASGYHALQFPTAASNQTGCRVYVFSNILANIPDYGFFLYRAGQMVWHSNCLPLQVIPLTNGDITSATPLAVSSSVTSHIFVPQDPAYPTGYSNFMCASAGKDGAAYKVQVGKVFQSTYISNPDEGRRMRGWACGGVGYIDTRFYDQYYKNALGIT

SEQ ID NO: 1586 - protein, 335 aa, Kosakonia cowanii
MAKPDWGDLQRRFLSEHAKSGVSPKEWCEAQGLNYSSARRYIKKPAAQIAQKTAQKKVRNAQKEIDVNALVENDGLTAQQRIFVAEYLKDRNATQAAIRAGYSAKTAEQIGYQLLQKTSVAAAIEKQQKASLMRTLASADEVLAQMWQLATFDANELSQYRRGACRYCHGFGHNYQWRDMVEFEEHRLKAIEKKGKEPVDVGGYGYDHNREPNPACPRCNGDGIGQPYFADTRKLPPVSRLAYSGIKLGKNGVEITAISRERMYEAVMKRLGLADSEFAQQLQQIEIERRQLEVEKLRKELAADPEDEVPMPVAININVADARVRKDDDGDIADP

SEQ ID NO: 1587 - protein, 358 aa, Kosakonia cowanii
MQNTNVAVADQNAVVNSNIALFDSQYLNAISTFAQIMAQGAATVPKHLQGNQADCMAVAMQAAQWQMNPFAVAQKTHLINGVLGYEAQLVNAVISRSGVLANRFEYEWYGPWEKVVGKFHIRKGEKGEYRVPGWTMADEAGIGIIIRATLKGEDHPRELDLLLAQARTRNSTLWADDPRQQLAYLAVKRWARLFCPDVILGVYTPDELEDRQEKEINPAPQQRVSVADIPAESTTNSAQESGTNIDGMADEFRDRIEAAQSVDQAKAVRVDIEAAKTTLGSALFTELKNKAVRRYYLVDARNKVEAAINSLPQPDEPDAAEQFTKAEQALAAAKRHLGDELYDQFAVTLLDMKPEYVA

SEQ ID NO: 1588 - protein, 1131 aa, Kosakonia cowanii
MEFFYLIKATQKSGKPDGVIWFSAKTEARAALTLDVELEEAGIETGRGKDYAKPIRTDFPVVNDLPGEGVVDFTWCDRYQLADDQRTWNVIPGAAPQDETDLSPASTINDADLHATPVTSTDTVDAGNTSQLENRTPSVRFAVHLLGDKYHSEISQEQQIVANELAMDEANVYFQNLLQAKNEVPDMSELSLHAEWKLVQAVKDVFPQHKEHEPALLAAFMSSWVKAEIGERAQLVENWLSGKLPAPQLADTSEPGDDAPVSNTEAQQDATPEEVAQAHVQAFRDRDITELHAVPTLSFRHRLLAQFITEKEYAYHIDNEQLNTVRQLEMDTDNSYVQNLLLAAENVEGMKNLRDFEFWRLTDAVKRVFPSDKATPDLSLMLQFMKAWKTTDYIDRGLLAKEWINGNRVSTIQRTDTGTNAGGGIKTDRNADYEHTLDTLDIEIACATLPMDFDIYNIPGSIHRRAKDIVAAKESPWKEWSTALRKTAGILDYSRAAIFALIREASSGITTFPDRMTGYISATLNEYKHDTPEARILAAARQIDSAAVDAGVIQCAEPSHQLVATPLPEVSNLGGGMFSIDGLLEEKANPAINTPSNEVAKQEVEIVGSVQMEETDPSKVEAGNALPAVEIANESAAQTISVSPADILAAATPELTRNVAPDLDQNIDALSQDEPELPPTEPEMTEIEPVADISEPEAAAKEWPAYFEPGRYEGLPNDVYHAANGISSTQVKDARVSLMYFEARHVSKTIQKERSKVLDMGNLVHALALQPETLVAEFSIEPEIPEGALTTTATIRECIDEYNASLPPQLSADDIKALLEAHNATLPAPLPLGAAVDETAESYMDLPEEFQRIESDKKQTAAAMKACIKEYNATLPAPVKTSGSRDVLLEQLAIVNPDLVAQEAQKPVPLKVSGTKTDLIQALKAVRPDAVFADELLDAWRENPEGKVLVTHQQFATALNIQAALHAHPTAGKLLLHPDRAVETSYFGIDEETGLEIRVRPDLELDVDGVRIGADLKTISMWNIKQSGLRAKLHREIIDRDYHLSAGMYMETASLDQFFWIFVNKDEGYHWIAIVEASPELVELGIMEYRATMRAIANAFDTGEWPAPITSDYTDELTEYDLRRLEALRAA

SEQ ID NO: 1589 - protein, 468 aa, Kosakonia cowanii
MANNDITWVRPEHRAASAAWKKIRDFCKGAEAVKEPGNNYLPLLDSTDKSMRNRKRNEDYLQRAVFYAITGNTKIGLLGLAFRKDPTFSAPEKLSYLLKNADGAGTSIYQQSQLVTENVLEVARDGLYVDYAEGSGQAIILRYLAENIINWRTKRINGRDQLVLVVLRECVEQEDGYAFKDEVQYRELALEEGRFICRVWRRSADAGSAAYVVTSEYQPKPKGKDSWDEIPFTFVGAQNNDPTIDDSPLAALVEINHGHFRNSADYEDSVWFCGQVQPYMTGLDEGWRDHLEKKGVKIGSRSPLLLPREGNFGYAQAQPNMLAKEAMDSKRDYMVQLGARLIEQNAAVKTATQSSSEQTSSTSVLGICVSNVSEAYSLAIGWCAKYLGVGEQQAAYAINQEFIAKVAESGMVTAIVNAWQSGAIRDTDMIRALQKLDLINPADSPDDIIDELHNPTPTLIGGNNGNGK

SEQ ID NO: 1590 - protein, 436 aa, Kosakonia cowanii
MTGISPTLNVPQAQFLAMPHKFKAYVAGFGSGKTWVGCGGICKGMWEHPKINQGYFAPTYPQIRDIFYPTMEEVAFDWGLKVQINESNKEVHFYAGRQYRGTTICRSMEKPATIVGFKIGNALVDELDVMPALKAQQAWRKIIARMRYKVAGLRNGIDVTTTPEGYKFVYQQFVKAVRDKPELATLYGLVQASTFDNEANLPDDYIPSLLASYPPELIKAYLRGHFTNLTSGTIYHQFDRRLNNCTDEEQQGEPLFIGMDFNVGKMAAIVHVKREGLPRAVRELVKVYDTPAMIKRIQEEFWRYEGGRYVASRQIYIYPDASGDSRKSNCASLTDIAQLREAGFSVMVNASNPPVKDRINSMNAMFCNALGERRYLVNVQRCPVYTESLEQQVWDKNGEPDKKADNDHPNDGGGYFIVKDYPIVKPAYSITMDTTF

SEQ ID NO: 1591 - protein, 310 aa, Kosakonia cowanii
MENQKTGFIPLYRSVLKQSWAKDVYLRTLWENLLLTAARQPYTANFKGRQWPLQTGQLVTTTADLGLDLCDRNGEPTSRHAVERMLGLFEREGMITTAGERRKGTVITITNYALYAQKMDDLPAHNATHNSEHNSAHNEPSNGAASEGDAAHNSEHKGALKPAHHEQEVILNTNVFNDRQKKSKSLPDAAVRTPAGDKWGTTEDLQCAEWMLALRNLTKPSLKKPNLTTWANDIRMLRQLDGRTHREICQLFKWAAQDSFWHKNILSPAKLRKQWDTLVLHREDRNRKPVNETPASDAHWNSPEAWKDFI

SEQ ID NO: 1592 - protein, 361 aa, Kosakonia cowanii
MATVNETLRDEAIAHTVWISRYSTGVANRMVKLLNDSDAELTARLLLAMDSLPTSQFTVRRLESMLGSVRELNQQAIAGMQTSLTDELLLLAGHEAGYQLSLFDSLLPQRVKERYPLQSITPEQLYAAAMAQPFQGRLLSEWADNLEADRMARVVNAVRRGYLQGDTTETIARQVRGIASKGYKDGALQLSRTNAASITKTAVNHLAATARTNFAEANGDVLKGKQWLSTLDNKTTPTCIIRDRLRYTLDNKPVGHKVPYLQGPGKIHFCCRSTETLITKSWRELGIDSNELDEDTRASMDGQVPADTTYLDWLARQSLPRQDEILGPERAALYRAGELKLGEMFTDKGEWISLARLKALS

SEQ ID NO: 1593 - protein, 267 aa, Kosakonia cowanii
MKLESSLKHFSPQGMNISDSVKGTSPDRLTGTDVMAAIGTTSSRARFGLAAFFGKAGISKTDEQLAVQALARYAMDVAPKNVRKAAGGEFGWCMQVLAQFAFAEYARSAASSSTCTTCSGTGFFSRIEDVIKHPGIFDADGVELVAPKIKHEQVKHACTACGGKGIIPARCRCGGKGEVLDRVATKERGAPVFKTCERCSGIGFSSVPSTAAHKAIIRRLPDLHVRTWTRNWKPFIESLVEICKQEEAKAEKEFQSATKYHDEDNII

SEQ ID NO: 1594 - protein, 256 aa, Kosakonia cowanii
MLIRNMLLKYYAPEDDGQGGGGGGTEITPEIQKLIDDQVAAQVSGLKTKNSELLGTIKQQKDNLSRFDGIDPDAVRGILQRFSDDEEAKLIAAGKIDEVLDKRTERLRADVDKQIKAANERADKAEAFSGKFRDRVLGDAIRSAASKAGALAEASDDLILRAKGTFQLNDEGEAVAVDANGDVLFGKDGKTPLSPLEWAESLKETAPHLFPRAEGTGAGGHKPGGGGSQKRSEMSASDKADYIRKHGQQAFLKLPK

SEQ ID NO: 1595 - protein, 162 aa, Kosakonia cowanii
MTRIGILGVNDLTETILVELFRLDPCAHVFLSSGEHERANLLARKFPCWIQDDVQAVINEADIIIITTGTYSSENPPEKIEYRKSQLIFFLEAWPSINSQVFSPYPDKKINFTTRHVALANISPFIHLTEIQIDDYLFILKVLLVAMKPVHTLDVNFRSSSE

SEQ ID NO: 1596 - protein, 37 aa, Kosakonia cowanii
MVKAALVRQQRLSGAITDSNCEVIMTNAHLKHQAKGA

SEQ ID NO: 1597 - protein, 204 aa, Kosakonia cowanii
MTKQINDTPTRGPSDHSVRDQVVDAATEHFGHYGYEKTTVSDLAKAIGFSKAYIYKFFDSKQAIGEVICSNRLAMIMEIVNAAIADAPTAAEKIRRLFRGLSESGSDLFFRDRKLYDIAAVAARDNWPSAQAHEQRLRQLIEQIIVEGREAGEFERKTPLDETADAIFMVMRPYISPVQLQYNLETAPAAAVLLPSLILRSLSP

SEQ ID NO: 1598 - protein, 376 aa, Kosakonia cowanii
MAARPRKNNVSVPNLYPLYSRKVNKVYWRYKHPITGKFHALGTDEAEAIAIATEANTRLAEQRSRQIIAISDKIATSKGKAITTNTWLDRYWKIHGERLDSGDIKLNTYKQKAKPVALLRERVSMKLISSVDVRDIAEILEAYISDGQPRMAQVIRSVLIDVFKEAQHYGEVPPGYNPALATKQPRRRITRQRLNLEEWQKIFDIADANHKYMGNAMLLALVTGQRLGDISNMKFSDIWDDHIHIVQEKTGSKIAIPLALRLNAINWSLREVVARCRDYAVSPYLVHFFRATSQAERGAQVKSNTITMNFSKARDKAEINWGDGTPATFHEQRSLAERLYEAQGIDTQKLLGHKSPNQTARYHDDRGKEWVVIFQK

SEQ ID NO: 1599 - protein, 169 aa, Kosakonia cowanii
MAKLTDKQELFAREFIKDLNATQAAIRAGYSEKTARAIGCENLTKPDIQLRIAELNQERMERVQIDADYVLRQAVKLHERCMQEVEPITDRRGEEVTDEQGRTVYGFDAKGAAAALKLVGEHITVQAFKTNVKAEHVGKDGKPIEVVNYSPADYKAAQSQLEGKLTGLD

SEQ ID NO: 1600 - protein, 283 aa, Kosakonia cowanii
MRMNAKELIAEARVTAPTLPPAAATLMNAIADRLDVQFVVLCESRNEANQLAGENALMKSAIKTHSESVHFCVGCGKDDPCSNDDVCYALEESTATDAFLTSLHAEGVEMLAAEAEKLMDDFGDDSYKVMVTADLQRFAKAFAAQLRCKSVSPAGVDQSPASPAITPLPVERNQYGYWTHPVYEEFCDGREYISNEDFNVWMKDNGLEWKVDYRDEEALDPEVDGYDLSTWQPEAPAGEGWFVGSIHDTDDGSVCIWLRNKTEPSPKTVAIARQFEQLKEAEK

SEQ ID NO: 1601 - protein, 487 aa, Kosakonia cowanii
MIYTTGSIAVSGNTLTGTGTNFTAAGSLIRNGCTVLALTSPAQAFQITSVDSATGLTVTPAASPAVPAGTKFAILLSDSLSVDGLAQDIAETFSMYQRYMGGFADVMSSNGDVTITINGQPITVPGQQSLAKKGANSDITSLNGMTTALSIQQGGTGGKTAAEARNKIGAASSGNNSDITSITGLTTALGIQQGGTAGKTAAEARTNLGLSDVATKTAGTAEGSVMLVGAMGTPTGGYKFYKTEGAIAPTLNWNDITLPGLFPNLIDASNSANSPTASGYYYAQVFVRGDSGAVQQIALPYATSGSNPGRILYRGKNGNTWSSWAEFYTTANTTKASDGTVKAASPIARIAADRKTCLRTDISDDGFVWCGCGTANGEAEGITISRLDTGVYVITGSAGLASSGWQLLPPRDPLGSGDLGIVEAEETESGGLTIRLYKRRYVLSEDGDIELQKGAAIDVPPTSWIDVRLDMPETSLWNQRAAGTQEQ

SEQ ID NO: 1602 - protein, 419 aa, Kosakonia cowanii
MIYTTGSIAVSGNTLTGTGTNFTAAGSLIRNGCTVLALTSPAQAFQISSVDSATSLTVSPAASVPAGTKFAILLSDSLSVDGLAQDIAETFSMYQRYMGGFADVMNGSGDVTITINGQPVTVPGQKSLAKKGANADITSLNGLTTAITLAQGGTGAKTAAGARTSLGLGSMATQSSDAVNITGGSGTFTSLSSDAVTITGGTASLGTIETKAGAEQPLVIRTAPSGLGYIRFRDASENPLAYLGFGASGAQHFILASNIGVNSVTLNTTGAVTVKAGGANYAFQTNGTATGQLWQSTSDVRIKKDIKPITNAREVISAITGYTFKKRYNLYDVAEPLYTEEAGILAQELELVAPEAVSKNDFGAHDLENNPIDDLRAVNYAGITPYLIELAKLHEAEISGLKGEVAQLKALVSSLVKGS

SEQ ID NO: 1603 - protein, 236 aa, Kosakonia cowanii
MRDKTISEILAHAAQAFPAECCGVVIQKGRVEKYIACRNLATSPEEQFELSPEDYASAEEQGTVVAVVHSHPGDGATTQPSELDMLMCDATEVPWVIASWPEGDIRTIMPRGDRPLTGRQFVLGHADCWSLIRDYFRIEHNIDLPDYSVDRHWWEEGENLYMDNWYACGFREYDGSSRPGDMVIMQVQASVPNHAGVLLEGNMLLHHLYGQLSQRIPYGGYYRDRTIKVLRYKDLM

SEQ ID NO: 1604 - protein, 243 aa, Kosakonia cowanii
MNKTIMAAIRAHALEEYPRECCGFVIQSGRRHRYIPVQNTHENPTEHFRIDGEFWANAEDIGTIIRVIHSHPGDGARPIPSDLDRQQCNNSGVVWGIYAPDSDEYAEIMPEAVPLIGRPFILGSHDCWGLIMDWHATQGVMLDDFRVDYPWWESQYSDNFYFDNWEQEGFIECDPAPGCMVIMQVESDKWNHAGIITEEGELLHHLYGQPSCITPYARGYFKDRTMICVRHRSLPEEIKPWRV

SEQ ID NO: 1605 - protein, 112 aa, Kosakonia cowanii
MAVETFSWCPKVAAQADTSFRTRKAQFGDNYAQVAGDGINPVTSQWSVSFTGDEAYVGAIKAFLKRHAGWKSFIWKPPLEPAGLWRSESVQIATHGNDKYTLSTTFIQAYHP

SEQ ID NO: 1606 - protein, 116 aa, Kosakonia cowanii
MAVETYKWPAQLGAGAIEYNQTIRASQFGNGYEQVAENGINSTAIKVPMIYVGKEVLINEIRSFLLAHTVKAFIITPPGEEKGLYRVVKDSVRKNQISSNAAELTFTIKRAYGVYA

SEQ ID NO: 1607 - protein, 1163 aa, Kosakonia cowanii
MATLRELIIKISADSSSFQSEITRASRMGSDYYRTMQAGGRQAAAAAKESERALSDLTNGFASAGKAAAAAAAAFATGKLVQIADEWNSVNARLQQASASADDFATSQRQLMEISQRTGTAFSDNASLFARAAASMREYGYSSEEVLKITEAVSTGLKLSGASTQESSSVITQFSQALAQGVLRGEEFNAVNESGDRVIRALAAGMGVARKDLKSMADQGKLTIDKVVPALMSQLGALQGEFATMPQTVSGSLQKVTNSFMGWVGGVNAATGATDALSGGLDGVAQTLDSFTSSAVSGALSDVADNMSVITTVAGALVGVGLAKYLSGIVTSATSATGALISAAKSEVALAVAQDRAAQSAVAASRADVYRAQQALQRAKGADVQAAQQEKIAAAEAKVTAAQSRLTTALAGGTATEKVRARAALERAQAGLAAAKNADVQAVAERRLAQAEAARDRNLANRVSTQSNLNSVTAVGSRLMSSALGIIGGIPGLVMLGAGAWYAAYQNQEQARRSAQEYGRTIDEVSQKIKQMSLPEASDNADKSKKALDEQNRLIDEQKSKVESLKKQIAGSQYLISNPGPMTKGGFMINHLTSLNTVTDELSTATGQLSVEQERLAQMQGKAASIQKILEDIERRRNDAIREQAWRQNAAYQSLLMMNGQHEKFNQLLGLGNQLLMARQGMTLAPLRVPQAEASQAQTDALEKSRRELALSRLKGEAKERARLGYAADELGLTADPQFQTNRLEYINNGLEEWRNNEANKKQPKGPKTDEEKAADAYKRMIKQQKEQIALQGQSTELARVKYQVVEGELSTLDKAQKAELMRNAALIDQVKLREQLRNYEANLADSNASARAANDAQLIGYGQGTRFRERMQEQFNIRKEFEQKNTDLLRQRQAGDINETFYQQGLALNKRYLEERLRDQEGYYTASDAQRGDWLTGMSEGYANWVDEATDYSAMAADGMKQAMGGAVTTITDMLNGNLDSWKDWGMNVLKIIETVLVNMMVANAASSLGSLFSFGASSAATASSGTAIQSAASNFTFNAKGGVYDSPSLSAYSGGVYQTPQLFAFAKGAGVFGEAGPEAIMPLTRAADGSLGVRAVGAPQFSGGGPSVSFGDININGGAQSTAGQGAAATAGRQLKDAIVTVINEQASMPGSPLWRLLKGA

SEQ ID NO: 1608 - protein, 1238 aa, Kosakonia cowanii
MSDIATISLRVNTAELERGNKALDDFQQTAGSAANKADDLNSVFRAGADSQKKNTQSLKEQKEELQALLNKISPVNRAMDELETLQSKLAGFRGKGLLGNEDYSRFSAVLDTTRDKLFQVMEAETAEGQERLKLAQDTQRAAAAQDSFLKSLSEQAATFRASKSDVLEYRASILGLTQEAAPLIQQIRERELAIASEAVQTRIAAQELREKQAAERQALAEASRLQSQNDNFVESLRNQAQAIGKSRAEVLELKAAQMGLLQEAGPYIAALKAQEAATAQEAANKKVSAMQSRMLRDAIAELEAAERAEASEMQRAQNIRDSFVRTLEQQAASIGKTRVELLEMKAAQLGVSQQAAPFIEKLREQDEAWKKGGISAGQYRQALRMLPAQFTDIATSIAGGMPLWMVLIQQGGQISDSFGGLGGLFQFIKEEVLGFKEATDDSSESLSENANSLAENAEHGRGMLSFLTPARLAVGGLVGVASLLAIAWYKGAQEASEFNKQLILTGNYAGKTAGQLSQLSRQIAYDAGVTIGESSATLAKIVGSGRFDGNKLEVVARAAAAMEDAVGQSIDTTIANFQKLYDSPVKASIELNTQLHYLTAAEFQYISALERRGDKEEAGQKAADSYSRAEQQRSQQVIDNLGLIDQVIRGVSDTWKAYWDAALGIGRKESTAEQLEVVRQRIKEITNQSRPGVFGMGNVGDGGAAKRELAALLEQERELGFVIKSQEGFNQKRAEFNKINQDGIDAQISFNKYLDAGTTQAEKRALAQKDLNKAIADNAKAVKATQGLPYEQRVNPLTPEQISKARAGIEKLYKDPKIPKAKGITVAAGDRAEDSAQAELLALQAQLKTLQDHRSVNDKISQQRNDLYATESKFAVLEAAASTRQLSKQEKSLLASKNQVLQLAQQKALLGDQITAQEQLNKRMDTAQKYVTQMVEKQAGLASGATMSDRLAGRQASMSQLRSGWLNAGGSLSDNGYKQELKAANDYYAAEDKLRGDWMAGARKGWAEYLDAATNVYGSMQSVAQSALGGISDMLTNLVTTGTASFKSFAASMMKMIADVINRLLVAYTVQAAMGWISAGTSPAGSGAGQSFAVPSFRPAWNGGYIPEFDTGGYTGDGGKYQPKGVVHGGEFVFTKEATAAIGVNNLYAMMRGAQGYAEGGVVGRPPMLGLMSGSGNAAPVINTTVNVDASGNASSQSSNSGDAMGRAMAAEIQNAATLVVQKHLKPGGMIYNFTKGR

SEQ ID NO: 1609 - protein, 1267 aa, Kosakonia cowanii
MTTTMIKGRKGGGTKTRTPVEAPDSIQSIARAKILVALGEGEFAGGLDGRSIYLGDASSYTPLQNADGSYNFNNVKYEFRSGTQDQSYIQGFPGVENELQVAYELKAAVPYVRSVSNTQLSALRIRLGWPSLLNQKDNGDKVGTRVEYAIELSVDGGAYAPVVKGAVDDKTTTLYERSHRIDLPKATTGWQLRVRRITPDSTTVNVVDSMRVEAVTEIIDAKLRYPNTALLYIEFDAKQFPNGIPQVVCNPKGRIIRVPDTYDPDTRTYSGTWEGGFKWAWTDNPAWIYYDIVLNELFGLGKRIDATQIDKWELYRIAQYCDQPVPDGKGGSGMEPRFRCNVYIQERNDAWTVLRDLAGIFRGMTYWGDNKLYVLADMPRDIWHIYNHASVVDGKFTFADPSETTRNTAALVNWSDPANHYKDTPEVVYDNDLAMRFDYSQLEMTAIGCTRQSEANRRGRWALLTNGIGEVVTFSTGMDVPPVGEVIGVAANELAGRVIGGRVSAVNGRNITLDRAADVKAGNRLFLNLPSGVAQARTVQAVKGNVVTVTTAYSEPPEAECCWGVDADDLFIALFRVTGTRNNDDGTFEVTGATYNPDIYAAVDTGARLDERPVSVIPPGVQAPPENIVIDSYSTVSQNIAITTMRAAWKPVKGAIAYEAEWRRDSGNWVSVPRTSSQGFEVPGIYAGRYLVRVRAVNASDVSSIWATSAEVTLTGKVGNPPKPVGFTASENVVFGIELNWGFPAGTDDTLKTEIQYSLTGSADDAMLLADVPYPLRRYQQMGLKAGQIFWYRAQLVDRTGNESGYTDWVRGQSSTDVTDITEAVLAQIKDTELFKDLIENAVESSKAVADLAEAVKQNADGLAEAAGANRQTAEAIIGNALAIADVVVRQSAQQGANSAKFEQLREVIATETEARVTDVIRLEAKTDQNAAGITEVRQALANETEARATAVDQLTAQTEENKASVTALTQTVTDLDSSTASRFEEISAEIAGIDGSDIRGGIQSNSIALITTTLAQVNDRTRLSVQYGDNKAGIERVDNVMADASQAVAESLRSMDASSGAGTANTTDFAKTMADFSQVSATKINSLSVTVNGQQAAIVQNAQVSADINNNLNAMYSIKVGVDANGRQYAAGMGIGVQNTPAGMQSQVLFLADRFAVMSQAGGTVSLPFVIQNGQTFINDAFFRDASIQFGKITDSLKSDNYAAGSAGWNLPKSGNAEFNQVTVRGAIYATNGNFNLTGPGNTTVINGLGVTVNLANGGLIRLGSW

SEQ ID NO: 1610 - protein, 1260 aa, Kosakonia cowanii
METITGSKGGSQKQHTPVEQPDSAQSMARCRLLLALGEGEFAGGLDATRIFLDGTPLGNADGTMNFEDVSWDFRPGTQTQMPIPGFPAVENESKVGVSLTKSTPWTRALSNIQIDAVLVRIGIPGLQQQQNNGDIVGTTVKYHIDLAVDGGAFSTVMTRTVTEKLSSLYELTHRINLPKATTGWQIRVVRDTDDSTSQLLQNKTQVQAITEVIDARLRYPHTALLYVSFNAKSFSDIPKISCKPKGRIIRIPSNYDPIARTYSGTWDGTFKWGWSNNPAWIWFDVLTEPRFGLGRRITADMLDKWELYRIAQRCDQKVPDGKGGSGTEPRFMFDVYIQSQADAWQVIKDIAAGFNGMTFWGNNMFNVVSDMPADTSKLQILNRAAVIGKPVYSSGSEKTRFSSALINFSDPDNHYQDRTTAVMFPDLVKQFKFKQTQITAIGCTRESEAQRRGGWAVYSNSLDRIITLQTGLDGYVYVPGTVFAFADERLSGRVYGGRVAAYNAGLKAVTTDRGTSAVAGDTLMIRTQGGTVESRVIQAVNGTQLVVSKPFKTDPLPNVVFVIDAGQLRLQYFRVTNLTFNDEENTYSITGAEYNSSKYDAVDNNARLDTPPISLIPTGLVNQPTNIQVSSFESVRQGQRITTLIASWDAPLDKNGKPQADVISYQVQWKRGDNEWINVPETGLRNIEVPGIFEGDYLVRVRAINSGGASSLWASSLLTHLKGRVGDVPKPVGLSASEDVVFGINVTWGFPADTADTLSTELQYSLAADGSNPMLLAAVPYPQKLYQQMGLKAGQEFWYRARLVDRTGNQSAYTEWVRGQSSTDVTDITEAVLAQIKDTDLFKDLIENAVDSSAKVAELAESVRQNADGLAEAAGANRQAAEAIIGNALAIADVVVRQSAQQGANSAKFEQLREVIATETEARVTDVIRLEAKTDQNAAGITEVRQALANETEARATAVDQLTAQTEENRASVTALTQTVTDLDSSTASRFEEISAEIAGIDGSEIRGGIQSNSIALITTTLAQVNDRTRLSVQYGDNKAGIERVDNVMADASQAVAESLRSMDASSGAGTANTTDFAKTMADFSQVSATKINTLSVTVNGQSAAITQASQAVADISGNLNAMYSIKVGVDAAGRQYAAGMGIGVQNTTAGMQSQVIFLADRFAVMSQAGGTVSLPFLVQNGQTFINEAFINYASITLARVGSWYSANYVAGQTGTIMKADGTFEVNGAVSGQGRMQITNNRIISYDAQNRPAAVMGQRL

SEQ ID NO: 1611 - protein, 252 aa, Kosakonia cowanii
MSISSDVQKLEPGSRVRLIEVDGEAFGAGILRFHNETLPHTEAEIIAAGGDASKLQPKSVWWQGLEYGAWPFELTGLSVSSDGQSARPTLTVANISGTIGALCRRFQGMAKAKVIIHETFAHYLDARNFAGGNPGANLNEERKQVYYIDRKSSSDDETVEFELSSPADLRGQLIPTRQIQPMCTWCMRGWYKTGNGCTYAGQNGWFDKDGNRVDDPSKDVCSGLLSNGCKPRFGANNELDYGGFPGASLLRG

SEQ ID NO: 1612 - protein, 257 aa, Kosakonia cowanii
MTALIDTAAMLAPGGKVRLVEVDASEFSGGIHRFHYSPFPHTSREIDEAQGDESKLGPKPVVFDGEVYDFWPFQLTGLALSTDQAAEPSLSVSNLDGHISALCLQFKDMVNAKVSIIDTYTVYLDAVNFPDHVNPTADPTMFTLQTFWLDTKTSEDDEVVTWGLSSPADLQSLVIPTRQITSLCEWALRGQYRSGDGCTYNGTAYFDANGNPVSDPAQDFCGGCFSDCRKRFGAGLAEPQSAILDFGGFPATVLFTR

SEQ ID NO: 1613 - protein, 199 aa, Kosakonia cowanii
MARLTTIRLYGALGARFGRVHKLAVQTSAEAVKALCINFDGLEDYLMNAKKNGMTFAVFRGKRNIGVQDFQELAGKSDIRIAPVMEGAKKAGMFQTILGAVMVVAGIIVGVATGWTGVGLTFGAGLILSGSSMMAGGLYQMLSPQPKGLQGRDDPDNKPSYAFGGSVNTLAMGNPVALLYGEREIGGAIISAGVVAEDI

SEQ ID NO: 1614 - protein, 375 aa, Kosakonia cowanii
MAARPRKNNVSVPNLYPLYSRKVNKVYWRYKHPITGKFHALGTDEAEAIAIATEANTRLAEQRSRQIMAISDKIATSKGKAITTNTWLDRYWNIQGERLDSGDIKLNTYKQKAKPVALLRERVGMKLISSVDVRDIAEILEAYISDGQPRMAQVIRSVLIDVFKEAQHYGEVPPGYNPALATKQPRRRIMRQRLNLEEWQKIFDIADVNHKYMGNAMLLALVTGQRLGDISNMKFSDIWDDHLHIVQEKTGSKIAIPLALRLKAINWSLREVVARCRDYAVSPYLVHFFRATYQAERGAQVKSNTLTMNFSKARDIANIDWGDGTPATFHEQRSLSERLYKEQGIDTRRLLGHKSQQQTDRYHDDRGKDWSKVNI

SEQ ID NO: 1615 - protein, 360 aa, Kosakonia cowanii
MQRPARYDANLPRNLTFRKRDKLYSWRNPITGQVIYLGRIDRREAIAQAIEANSYLDQNYIPSSLLQRIKETPTLTMAKWLERYDVILERRELKPNTMKVRRNQIETIRKEFGTIALSAVTTKDIAEFLETYIACDKKSMAAGLRSVLLDVFREALVEGHIERNPAEPTRTPAPKVKRERLLLEAYFTIRETAAANSVWAANAFDLALVTAQRREDIAMMKFTDIREDRLFVIQEKTGNKLAIPLDLKLEAADLHLKEVIERCRVNNPSEFLLYSPVRRGGRKPGPLTPDGLTQAFSDTRDVTVLKFGPYPPSFHEIRSLASRLYEKEKGEEFAQRLLGHKNLSMTKKYLDSRGAEYVRV

SEQ ID NO: 1616 - protein, 317 aa, Kosakonia cowanii
MQMFIAGTSFDAINSMAASYVLDVITITGTGSKTYSLSGVSLTYAIVNDFMGGQLTGATYSVSVSGLTVSWNVNNAVTLIVYGSPVAGTQSDYFGFQLFQYINGARTVKLAPNYVPLCLRQIIDVPAGARTVQTQVPAGNPVMCFHRHTGEAMDLCWWKPVTASGYHALQFPTAASNQTGCRVYVFSNILANIPDYGFFLYRAGQMVWHSNCLPLQVIPLTNGDITSATPLAVSSSVTSHIFVPQDPAYPTGYSNFMCASAGKDGAAYKVQVGKIFQSTYISNPDEGRRMRGWACGGVGYIDTRFYDQYYKNALGIT

SEQ ID NO: 1617 - protein, 335 aa, Kosakonia cowanii
MAKPDWGDLQRRFLSEHAKSGVSPKEWCEAQGLNYSSARRYIKKPAAQSAQKSAQKQVRNAQKEKDVNALVENDGLTAQQRIFVAEYLKDRNATQAAIRAGYSAKTAEQIGYQLLQKTSVAAAIEKQQKASLMRTLASADEVLAQIWQLATFDANELSQYRRGACRYCHGFGHNYQWRDMVEFEEQRLKAIDKKGKEPVDVGGYGYDHNREPNPACPRCNGDGIGQPYFADTRKLPPVSRLAYSGIKLGKNGVEITAISRERMYEAVMKRLGLADSEFAQQLQQIEIQRRQLEVEKLRKELAADPEDEVPLPVAININVADARVRKDDDGDIADP

SEQ ID NO: 1618 - protein, 150 aa, Kosakonia cowanii
MNLINLIKNYSHVIVIGLICVALWGLNTRNAQLTATNERLEKLANSKDDQINDLRSKNDGLAASVGELVTAVRQQNEVMSQVTEQRAVTAQKNRKLQNEIKQYLEADKCAQSRVPDNAADRLRAAAKAAGGVPDNKPAANQPAGRTDIPH

SEQ ID NO: 1619 - protein, 358 aa, Kosakonia cowanii
MQNTNLAVADQNTVVNSNIALFDSQYLNAISTFAQIMAQGAATVPKHLQGNQADCMAVAMQAAQWQMNPFAVAQKTHLINGVLGYEAQLVNAVISRSGVLANRFEYEWYGPWEKVVGKFHIRKGEKGEYRVPGWTMADEAGIGIIIRATLKGEDHPRELDLLLAQARTRNSTLWADDPRQQLAYLAVKRWARLFCPDVILGVYTPDELEDRQEKEINPAPQQRVSVADIPAESTTNSAQESGTNIDGMADEFRDRIEAAQDVDNAKAVRVDIEAAKTALGSALFTELKNKAVRRYYLVDARNKVEAAINSLPQPDEPDAAEQFTKAEQALAAAKRHLGDELYDQFAVTLLDMKPEYVA

SEQ ID NO: 1620 - protein, 1131 aa, Kosakonia cowanii
MEFFYVVKATQKSGKQDAVIWFTAKSEARAALTLDVELEEAGIETGRGKDYAKPIHTDFPIVNDLPEEGVVDFTWCDRYQLADDQRTWNVIPGAAPQDETDLAPANTIYDADFHATPVTATDTVDAASISQLENRTPSVRFAVHLLGDKYHSEISQEQQIVANELAMDEANVYFQNLLQAKNEVPDMSELSLHAEWKLVQAIKDVFPQHKEHEPALLAAFMSSWVKTEVSERAQLIEDWLGGRLPVPELITTSDLGDDAPVSNAEDQQDAKPEEVAQAHVQAFRDRDITELHAVPTLSFRHRLLAQFITKKEYAYHIDNEQLNTVRQLEMDTDNSYVQNLLLAAENVEGMKNLRDFEFWRLTDAVKRVFASDKATPDLSLMLQFMKAWKTTDYIDRGLLANEWINGNRVSTIQRTDTGTNAGGGIKTDRNADYEHTLDTLDIEIACATLPMDFDIYNIPGSIHRRAKDIVAAKESPWKEWSAALRKTAGILDYSRAAIFALIREASSAMTQFPDRMTGYISATLNEYKHDTPEARILAAARQIDSAAVVAGVIQGTEPSHQLVTTAQPEVANLGGGKFSINGLLGDKANPVINTPSNEVAKQEVENVDHVQMEETDPSKVEAGNALPAVEVANEAAAQTISVSPADILAAATPELTRNVVPDLDQNIDALSQDEPELPPTEPEMTEIEPVADISEPEAAAKEWPAYFEPGRYEGLPNDVYHAANGISSTQVKDARVSLMYFEARHVSRTIQKERSKVLDMGNLVHALALQPETLAAEFSIEPEIPEGALTTTATIRECIDEYNASLPPQLSADDIKALLEAHNATLPAPLPLGAAVDETAESYMELPEEFQRIESDKKQTAAAMKACIKEYNATLPASVKTSGTRDALLEQLAIINPDLVAQEAQKPQPLKVSGTKADLIQAVKAVKPDAVFADELLDAWRENPEGKVLVTRQQLETALAIQKALHAHTTAGKLLQHPDRAVETSYFGIDEETGLEIRVRPDLELDVDGVRIGADLKTISMWNIKQSGLRAKLHREIIDRDYHLSAGMYMETASLDQFFWIFVNKDEGYHWIAIVEASQELVELGILEYRATMRAIANAFDTGEWPAPITTDYTDELTEYDLRRLEALRAA

SEQ ID NO: 1621 - protein, 225 aa, Kosakonia cowanii
MGFALPNGATVFVGSKLATPVAVTGVSNAAGAVFTVANGHGLAVGDVVLVSSGWALIDSLVARVTAQTTTSVTIGVINSTDTNFFPAGSGTGSLSKVAEWTEIPQITEVSQSGGDQQYTQIQFLADDRQRNLATYKAAKSQTFTVAHDSTLPIYAVLSAADRSGDTLPLRMYVPKAKETRYWSGKPSFDPQPTTAPNAVETVQPAFAIQSREITFYKDAAPQAAA

SEQ ID NO: 1622 - protein, 202 aa, Kosakonia cowanii
MADNQAFMVSINAFVSQAKERQEEVVRVVGIKILARLVQMSPVGNPELWAVNQTAAAYNAAVSEHNSLLRQNPDNLTKAGRLRPGRKVKDGMDLKAPPGYTGGRFRGNWQVSFDARTTDETGRVDKAGHLTMAAGNVTLGLFKVGVRDIYFCNNVPYSYRLEMGHSSQAPGGMVRITAAEFQRYFSQAVSEVKNDTGHHNGA

SEQ ID NO: 1623 - protein, 160 aa, Kosakonia cowanii
MIITDITSPAMNSYAGEGDLKAFADLRDITLPEKIAPLLIRAMDYLEGLDWAGWRSEPKQPLAWPRAGIELDGYELPAGEVPRLVVTAQCMLAVEAMDGDLLGSVREAAVKSDRVEGAVTTTYAVADGEVFIPSYPAVMALLGELAGGRGYAVNAFAERA

SEQ ID NO: 1624 - protein, 103 aa, Kosakonia cowanii
MATKFQLQPKPTFKADVNIPRAGEDDGVLTFTFRHKPVKELAALEEIEGKTAIDFLTEITESWALPDEFSRENLEMLLDNYPGAMKAIVGTYYRELTGNREKN

SEQ ID NO: 1625 - protein, 136 aa, Kosakonia cowanii
MIPDITTALESMLGLWADGEGVRVTWDNIQFDPPGDGLYLISHDMPAQPYSIDMAGGCRVYPGVYQVTVVAPAGGGKSQARALAHRVAGLFPENQEISGDGFTAWVTSPPAIYPGIADGVSYSIPVSINYRADISA

SEQ ID NO: 1626 - protein, 257 aa, Kosakonia cowanii
MLIRNMLLKYYAPEDDGQGGGGGGGTEITPEIQKLIDDQVAAQVSGLKTKNSELLGTIKQQKDNLSRFDGIDPDAVRGILQRFSDDEEAKLIAAGKIDEVLDKRTERLRADVDKQIKAANERADKAEAFSGKFRDRVLGDAIRAAASKAGALAEASDDLILRAKGTFQLNDEGEAVAVDANGDVLFGKDGKTPLSPLEWAESLKETAPHLFPRAEGTGAGGHKPGGGGSQKRSEMSASDKAEYIRKHGQQAFLKLPK

SEQ ID NO: 1627 - protein, 468 aa, Kosakonia cowanii
MANNDITWVRPEHRAASAAWKKIRDFCKGAEAVKEPGNNYLPLLDSTDKSMRNRKRNEDYLQRAVFYAITGNTKIGLLGLAFRKDPTFSASEKLSYLLKNADGAGTSIYQQSQLVTENVLEVARDGLYVDYAEGSGQAIILRYLAENIINWRTKRINGRDQLVLVVLRECVEQEDGYAFKDEVQYRELALEEGRFICRVWRRSADAGSAAYVVTSEYQPKPKGKDSWDEIPFTFVGAQNNDPTIDDSPLAALVEINHGHFRNSADYEDSVWFCGQVQPYMTGLDEGWRDHLEKKGVKIGSRSPLLLPREGNFGYAQAQPNMLAKEAMDSKRDYMVQLGARLIEQNAAVKTATQSSSEETSSTSVLGICVSNVSEAYSLAIGWCAKYLGVGEQQAAYAINQEFIAKVAESGMVTAIVNAWQSGAIRDTDMIRALQKLDLINPADSPDDIIDELHNPTPTLIGGNNGNGK

SEQ ID NO: 1628 - protein, 436 aa, Kosakonia cowanii
MTGISPTLNVPQAQFLAMPHKFKAYVAGFGSGKTWVGCGGICKGMWEHPKINQGYFAPTYPQIRDIFYPTVEEVAFDWGLKVQINESNKEVHFYAGRQYRGTTICRSMEKPATIVGFKIGNALVDELDVMPALKAQQAWRKIIARMRYKVAGLRNGIDVTTTPEGYKFVYQQFVKAVRDKPELATLYGLVQASTFDNEANLPDDYIPSLLASYPPELIKAYLRGHFTNLTSGTIYHQFDRRLNNCTDEEQPGEPLFIGMDFNVGKMAAIVHVKREGLPRAVRELVKVYDTPAMIKRIQEEFWRYEGGRYVASRQIYIYPDASGDSRKSNCASLTDIAQLREAGFSVIVNASNPPVKDRINSMNAMFCNALGERRYLVNVQRCPVYTESLEQQVWDKNGEPDKKADNDHPNDGGGYFIVKDYPIVKPAYSITMDTTF

SEQ ID NO: 1629 - protein, 320 aa, Kosakonia cowanii
MENQRTGFIPLYRSVLKQSWSKDVFLRTLWENLLLSAARQPYTANFKGRQWPLLTGQLVTTSADLGLSLCDREGKPCSRHAVDRMLEVFEREGMISRSGEKRKGSVITITNYAEYAQKMDDLPAHYPEHISALNAEHGEASNGEASDGGAAHKTEHLAERFPENHEQQSNNNNKNIKRSTSENSGGSSDKPGKKLPVLKPDAAIQSGGKWGTSEDLRCAEWLFSEVQRIAPSAKQPTWASWANDIRLMRERDGRTHKEISQLFRWACNDSFWQGNVLCPATLREKWTQLDIKRNKQPAGSASVKPKIDVNNTDWIHGVKL

SEQ ID NO: 1630 - protein, 361 aa, Kosakonia cowanii
MATVNETLRDEAIAHTVWISRYSTGVANRMVKLLNDSDAELTARLLLAMDSLPTSQFTVSRLESMLGSVRELNQQAIAGMQTSLTDELLLLAGHEAGYQLSLFDSLLPQRVKERYPLQSITPEQLYAAAMAQPFQGRLLSEWADNLEADRMARVVNAVRRGYLQGDTTETIARQVRGNASKGYKDGALQLSRTNAASITKTAVNHLAATARTNFAEANGDVLKGKQWLSTLDNKTTPTCIIRDRLRYTLDNKPVGHKVPYLQGPGKIHFCCRSTETLITKSWRELGIDSNELDEDTRASMDGQVPADTTYLDWLARQSLPRQDEILGPERAALYRAGELKLGEMFTDKGEWISLARLKALS

SEQ ID NO: 1631 - protein, 199 aa, Kosakonia cowanii
MEKRTVIKLSGSMAQRFGRTHRRALSSASEVFRALSSTVDGFEDYLREARARGLDFVIFRDRRNIGQEEFSLLGPGDELRIIPVIRGSKRAGIFQAVLGAALIAGGIALGPAGAGLIGKGVALNVALVGASMALGGVVQLLSPQVAGMRMRQDPDNKPSYAFGGPVNTTASGNPVPLLYGQREIGGAIISAGIYAEDQQ

SEQ ID NO: 1632 - protein, 267 aa, Kosakonia cowanii
MKLESSLKHFSPQGMNISDSVKGTSPDRLTGTDVMAAIGTTSSRARFGLAAFFGKVGISKTDEQIAVQALARHAMDVAPKNVRKAAGGEFGWCMQMLAQFAFAEYARSAASSSTCTTCSGTGFFSRIEDVIKHPGIFDADGVELVAPKIKHEQVKHACTACGGKGIIPARCRCGGKGEVLDRVATKERGAPVFKTCERCSGIGFSSVPSTAAHKAIIRRLPDLHVRTWTRNWKPFIESLVEICKQEEAKAEKEFQSATKYHDEDNII

SEQ ID NO: 1633 - protein, 201 aa, Kosakonia cowanii
MRKPARRKCNVCNEWFIPAYANIRWCCPEHGAIYAMELRAKEKVKAEAKRIKAKHEADKVDRKRRAARRKELKPIRHWVQMTQRAFNDWRREMLLAAGHGCISCGTKTAFAWHAGHYRTTAAAPQLRFNPDNIWLQCSACNVHKSGNIEAYRVALVELIGEERVLALESNNETHRYTREELNGIRARARADLRVLKQQEAA

SEQ ID NO: 1634 - protein, 228 aa, Kosakonia cowanii
MKSLAEQMHNFDREQMRRFAHNLPEQYQEESPTEQVAQIINGVFTQLLAAFPAAMAGRSQDEFDEIRRQWVKAFAENGITDMETVDRGMRVARRQAKPFLPSPGQFVAWCKEEARAFGITVDDVMTEFWMWRKMVFQYPSSEQYPWPQPVLYHICLELRRRSTDGQLSQKELQNAAADVLAYWEKRAAEGHPVPPVRRALQAPKAEHGPTPAQILKARYERMKNDGNG

SEQ ID NO: 1635 - protein, 119 aa, Kosakonia cowanii
MKRMPDKDAGFWAGLIAWLYSHKTEWGYAGVAGMFSLLRSAYAQSSWSKRVLDAVSCSALAFFAAPTLQVVGGVLNWNVPDTAAQVFAVYIGYVGNDYISEKLRGWINRRTGDNSENQS

SEQ ID NO: 1636 - protein, 299 aa, Kosakonia cowanii
LLDRRKTAPDKYTQENYERDLASLQEAESKYRDTVLENYDKISDAQADWRKGATAGFKNYLESARDLSGQAKSLVTGAFGEMEDSLVNFAMTGKLSFADFTKSIISDMARIASRQASSALLNSLVGAASTYFTGGGGGNGLAAGSAGAVSSDLGASQAGYSSTYFPQADGGAWAGGVQMFANGGAFANGVVNTPTAFGMAGGQTGVMGEAGPEAIMPLTRTAGGQLGVRALNGGGSGTSISISAPVTVITQDRSNEGMQIDQQALAKGLQTQIKATAEKVVADSWYPGGISFRHSQGRA

SEQ ID NO: 1637 - protein, 488 aa, Kosakonia cowanii
MFSLNTLAMVVGACILTGCTVGPDYYRPEVPIAKHYHAQPALQQPTTSESASFSIWWENFGDPLLSRFVSDALTQNLDLAQASARMMQAQAGLGAATAALLPSGNISGQAARAYQSVETPLGQVLSSTPDYNRYGSSYETDLNAGWEIDLFGGLRRGRQAALADYQASEAGVAATRLAVAAQTADIYITLRGLQSRLDIANKQVITQQLLLEKVQLLHSKGLASEYQVRQTEGALAQVKATVPVLNNGLDGAMNALDVMLGTPPGTHHAQLASPGAIPHTPAITAMGTPADLLRRRPDIIVAERHLAASSARIGVAVSEYYPKFSLNALLGSATAVSGDNLFTAGASQSAGVLGLRWRLFDFGRINAQINQATGQEAEALAAYRLSVLRATEDVENAFSALVNRQTQAATLTSGETALASARQSSFIAFQQGTASLIDVLHNDETLLQASDARAQAQTESARAAVAAFRALGGGWQSTLSGEMANTPG

SEQ ID NO: 1638 - protein, 115 aa, Kosakonia cowanii
MNLPESVGPVPVVRTPDGYWCHPALTAFYRDRDCVPQAEYDHWLADNGLEDTLVCMDTDDDTPAAQAYARNADISYWTPPVPAGEGWFTGAIFDSEDDGPACIWLRRREVPCDAG

SEQ ID NO: 1639 - protein, 397 aa, Kosakonia cowanii
MSIVPINIGGGANDGAGQSLRSGGETINSNFAELDVRTTAAQLAADKAGETASLAGEAATDARARADAAQAKADAVAAEKGQPNGIATLDDSGIVPASQLPSYVDDVLEFESESAFPATGETGKIYVAADSNDQYRWSGTQYILLSASPGSTDAVPEGSVNKYWTNARTVASVLTGLLTTNPAVVAATDTILAAIGKLQRQISDAVASLGNKAAKGANSDITSLSGLTTALSIAQGGTGATTLAAAQAALGINSAINLPTGTNLNNIQATGFYMQQANANATLALNYPVAAAGSLISVQLGSSITTQTYTVYNTGEQYVRSRYVAAWSDWRLTITDATVKFAYAYPHGGTEAAPATVTINSRYTVANPFPGHEVIVQAEILIGGKWGDAGWFYSSGG

SEQ ID NO: 1640 - protein, 220 aa, Kosakonia cowanii
MNKANRAAIEAHAIDEYPREACGLLVRVSRKEIYIPCRNIASTPNEHFRLAPEDYAAAEDRGEILAVVHSHPDYPATPSEADRVSCEASGLLWHILEVRKDDDDVVRAGNLVSFAPVGYQAPLIGRKFVHGVHDCLSIILDFYRREMGIDLGSYEREDGWWDKGGNLYLENLPAAGFEKVPAPQHGDIVLMQIRSPVPNHAGIYLADGVLRSEPEHYPAP

SEQ ID NO: 1641 - protein, 110 aa, Kosakonia cowanii
METFTWAPDKEPSGTVSFRRKSAKFGDGYEQVAEDGMNNKTQSWPLTFTGPKSRIAEIKAFLDAHKGATAFSWTEPFGESLLVRCSEYQPRHAGGGVYRLAATFEQAFHP

SEQ ID NO: 1642 - protein, 958 aa, Kosakonia cowanii
VRAEKAAEGVAKGADKASESIKKQKDELSELLGEIDPTVKALGRLDELESRLAKQKKLGALDAATFSEYQAKIEQSRASLGGFDDSLTRTGNTAKQTAAALRGVPAQFTDIVVSLQGGQSPMTVLLQQGGQLKDMFGGIGPAARALGGYILGLVNPFTVAAAAVATLGYAFVSGSEEAVEFQKSIILTGNAAGTSADTLSNMAQQVAATVGTTGAASEVLAKLASSGKIASSSFEGVATAALEMEKATGRAVEETIAEFVKIGKDPVAAAKELNDQYNFLTATTYAQIVALKEQGDTIGAAKLLTDTYVDTIKRRSSEVTENLSIWERGWKSLKGEISATADAIKNIGRDQTLASQITEAQQRVAAAQSALNGMPDDTDAQAKLTNSKLELEFLIQQKNTQDAIAKAQGVSAQRQREGIDARIRVKAISDSSLSSEEKRNDLIKEYKREVEALRRANPDDPLVQEAVVAKTIQNIRDRNKDPKTATSSINLTDFNDSKNQLTLILSEYKSAQRELEAAQKAGLLTQEDYLLKRKALIGNERDEVTAAYQAEIAALEASKSQASTTAAQRIQLDQKIADAKASMIKAQKEADSELEVIATNEQGRLAKQAQAIKSYTDALDQQNAALRRAGSRAADGVGLGDRQNAINSELNGIADRANQQRLDLARDKADQARNMSAEEYRAKLDAINRSEREMSETVLSNYEQLSEAQGNWRNGATSAFSNYLDSARDVAGQTKSLFTNAFSSMEDALVSFAMTGKLSFSDFAKSVLADMARMTARAATSSALSSLFGIAASAVGSYFGSPASAGSTQAGYSGDLSGFTPGSIQAKGGAWSGGVQMFADGGAFTNSVVSKPTAFGMAGGETGIMGEAGPEAIMPLTRTAGGKLAVMAVGRGQNSSTNQVVIQQNIAVPDGQGAGGADETTSQAVAQAYARAAKQGAQEQIARDLRPGGQIWQAINKR

SEQ ID NO: 1643 - protein, 215 aa, Kosakonia cowanii
GAWVELFELDATMLGAELYRFHGYPQQSSIFWQGKEYSPWPIKAEGFEMTGQGTQPTPTLSVGNVGGFITALVLYFEDLVGAKLIRHRTLGKYLDGQPEADPEEELPPDIWYVERKAAEDNEVVQFELATALDFAGVQLPRRQIVANVCWWLSCGGYRGPYCGYNGPPVADENDVIVTDAAKDKCGGRLTSCKLRFGENNPLPYGSFPAAGLLRT

SEQ ID NO: 1644 - protein, 63 aa, Kosakonia cowanii
MYEPRPSEAALAAFGMTLDDIPETEYEVWPDNWRAFLLFEAMSTQWRTGMGGASGLDYSALPP

SEQ ID NO: 1645 - protein, 217 aa, Kosakonia cowanii
MSAILPNGSILEIAATFSPPTPVTAISNANPAVANAAAHGLSNGDILVVTSGWTRLNDKVVRVAGSDAGSFELEGINTTNTTVYTAGAGAGAVRAASGWAQISQVTDSNSSGGEQQFTTFGFLEESDDRQLPTTKSPISMAITVADDPSLPYVAVCEAADEDREPRVVRLTLPNGSVIYYHAYVSITSTPTLSRNSIMTRTVTLSLAARPTRYAATV

SEQ ID NO: 1646 - protein, 112 aa, Kosakonia cowanii
SLREIIIEIGNSLIRMSPVDTGRFRGNWQMSIDAPSEGTLGALDPTGATATARIAEGSIFFRAGTTAFIVNNLPYAIPLEYGHSDQAPGGMVRITQARFQQIVLEAIRNHKL

SEQ ID NO: 1647 - protein, 129 aa, Kosakonia cowanii
PAQEALLRRAALEMNGMAWKGQKMSSDQALAWPRRGIQLDCEIKPNDYLPARIPYGQMALAAEIHRDDIDPIETRKGAVIRERVEGAVETEYATISNTSGRLLPAAPDRPSRTQFADYLLKRGLFAVRA

SEQ ID NO: 1648 - protein, 111 aa, Kosakonia cowanii
MTRAVVPHMRRQGSGRIINIGSILGVVAVPYVALYVASKHAVDGYSQALDHELRTHGIRVTVIEPGYTRTSFESNSLEADAKLDLYEDIRVKVTKVVNQAMATAESADVVA

SEQ ID NO: 1649 - protein, 168 aa, Kosakonia cowanii
MRMNAKELIADARVTAPTLPPAAAKLMTAMADRLDLQFVVLCESRNEAKQLAGENALMKSAIKTHSESVHFCVGCGKDDPCSNDDVCYALEETPATDAILASLRAEGVDMAMEAAKPEVANEFQRETFDQCVTAAVKYPQSDLAGKVEMVAWLELFAAQLRSKSEVQS

SEQ ID NO: 1650 - protein, 213 aa, Kosakonia cowanii
MIYTTGSIAVSGNALTGTGTNFTAAGSLIRNGCTVLALTSPAQAFQITAIDSATSLTVTPTASPAIPAGTKFAILLSDSLSVDGLAQDIAETLTMYQRYMGGFADVMNGSGDVTITINGQPVTVPGQKSLAKKGANSDITSLSGLTTALSIAQGGTGAKDAAGARAAFDLDNLYLRGDRNLSDVKSKKTARDNLGVNASPNMWYVWQNPNATS

SEQ ID NO: 1651 - protein, 213 aa, Kosakonia cowanii
MIYTTGSIAVSGNTLTGTGTNFTAAGSLIRNGCTVLALTSPAQAFQITAIDSATSLTVTPAASPAIPAGTKFAILLSDSLSVDGLAQDIAETLTMYQRYMGGFADVMNGSGDVTITINGQPVTVPGQKSLAKKGANSDITSLSGLTTALSIAQGGTGAKDAAGVRAAFDLDNLYLRGDRNLSDVKSKKTARDNLGVNASPNMWYVWQNPNATS

SEQ ID NO: 1652 - protein, 236 aa, Kosakonia cowanii
MRDKTISAILAHAAQAFPAECCGVVIQKGRVEKYVACRNLATSPEEQFELSPEDYAAAEEQGTVVAVVHSHPGDGATTQPSELDMLMCDATEVPWVIASWPEGDIRTIMPRGDRPLTGRQFVLGHADCWSLIRDYFRTEHGIALPDYSVDRHWWEEGENLYMDNWHDCGFREFDGPSRPGDMVIMQVQASVPNHAGVLLEGNMLLHHLYGQLSQRIPYGGYYRDRTIKVLRYKDLM

SEQ ID NO: 1653 - protein, 1163 aa, Kosakonia cowanii
MATLRELIIKISADSSSFQSEITRASRMGSDYYRTMQAGGRQAAAAAKESERALSDLTDGFASAGKAAAAAAAAFATGKIVQIADEWNSVNARLQQASSSADDFATSQRQLMEISQRTGTAFSDNANLFARAAASMREYGYSSEEVLKITEAVSTGLKLSGASTAEAGSVINQFSQALAQGVLRGEEFNTVNESGDRVIRALATGMGVARKDLKSMADQGKLTIDKVVPALMSQLGALQGEFATMPQTVSGSLQKVTNSFMGWVGGVNAATGATDALSGGLDGVAQTLDSFTSSAVSGALSDVADNMSVITTVAGALVGVGLAKYLSGIVTSATSATGALISAAKSEVALAVAQDKAAQSAVAASRADVYRAQQALQRAKGADVQAAQQEKIAAAEAKVTAAQARLTTALSGGTATEKVRARAALERAQAGLAAAKNADVQAVAERRLAQAEAARDRNLANRVSTQSNLNSVTAVGSRLMSSALGIIGGIPGLVMLGAGAWYAAYQNQEQARRSAQEYGRTIDEVSQKIKQMSLPEASDNADKSKKALDEQNRLIDEQKSKVESLKKQIAGSQYLISNPGPMTKGGFMINHLTSLNTVTDELSIATGQLSVEQERLAQMQGKAASIQKILEDIERRRNDGIREQAWRQNAAYQSLLMMNGQHEKFNQLLGLGNQLLMARQGMTLAPLRVPQAEASQAQTQALEKSRRELALSRLKGEAKERARLGYAADDLGLTADPQFQTNRLEYINNGLEEWRNNEANKKQPKGPKTDEEKAADAYKRMIKQQKEQIALQGQSTELARVKYQVVEGEFSTLDKAQKAELMRNAALIDQVKLREQLRNYEANLADSNASARAANDAQLIGYGQGTRFRERMQEQFNIRKEFEQKNTDLLRQRQAGDIDETFYQQGLALNRRYLEERLRDQEGYYTASDAQRGDWLTGMSEGYANWVDEATDYAGMAADGMKQAMGGAVTTITDMLNGNLDSWKDWGMNVLKIIETVLVNMMVANAASSLGSLFSFGASSAATASSGTAIQSAASNFTFNAKGNVYDSPSLSAYSGGVYQTPQLFAFAKGAGVFGEAGPEAIMPLTRAADGSLGVRAVGAPQFSGGGPSVSFGDININGGAQSTAGQGAAATAGRQLKDAIVTVINEQASMPGSPLWRLLKGA

SEQ ID NO: 1654 - protein, 1253 aa, Kosakonia cowanii
MTTTIIKGRKGGGTKTRTPVEAPDSIQSIARAKILVALGEGEFAGGLDGRSIYLGDASSYTPLQNADGSYNFNNVKYEFRSGTQDQSYIQGFPGVENELQVAYELKAAVPYVRSVSNTQLSALRIRLGWPSLLNQKDNGDKVGTRVEYAIDLSVDGGTYVTVVNGAVDDKTTTLYERSHRIDLPKATTGWQLRVRRTTPDSTTVNVVDSMRVEAVTEIIDAKLRYPNTALLYVEFDAKQFPNGIPQVVCNPKGRIIRVPDTYDPETRTYSGTWEGGFKWAWTDNPAWIYYDIVLNERFGLGQRIDATQIDKWELYRIAQYCDQPVPDGKGGSGMEPRFRCNVYIQERNDAWTVLRDLAGIFRGMTYWGDNKLYVLADMPRDIWHIYNHASVVDGKFTFADPSETTRNTAALVNWSDPANHYKDTPEVVYDNELALRFDYSQLEMTAIGCTRQSEANRRGRWALLTNGIGEVVTFSTGMDVPPVGEVIGVAANELAGRVIGGRVSAVSGRNITLDRAADVSAGNRLFLNLPSGVAQARTVQAVNGNVVTVTTAYSETPEAECCWGVDADDLFIALFRVTGTRDNDDGTFEVTGATYSPDIYAAVDTGARLDERPVSVIPPGVQAPPENIVIDSYSTVSQNIAITTMRVAWDAVKGAIAYEAEWRRDSGNWVSVPRTSSLGFEVPGIYAGRYLVRVRAVNASDVSSIWATSAEVTLTGKVGNPSKPVGFTASETVVFGVELNWGFPANTDDTLKTEIQYSLTGSDDDAMLLADVPYPLRKYQQMGLKAGQVFWYRAQLVDRTGNESGYTSWVRGQSSSDVTDITEAVLAQIKDTELFKDLIENAVDSSAKVAELAEAVKQNADGLAAAAGANRQTAEAIIGNALAIADVAVRQSAQHGANSARFEQLREVIATETEARVTDVIRLEAKTDQNAAGITEVRQALATEEEARATAVDELTARTDKNAANVTVLTQTVTDLDSSTASRFEEISAEIAGIDGSDIRGGIQSNSIALITSTLAQVSQSTRMSVQYGANAAGIQRVDNVMADASQAVAESLRTLDASAGGGTANATDFAKTLADFSQVSATKINSLSVTVNGQQAAIVQNAQVSADINNNLNAMYSIKVGVDAAGRQYAAGMGIGVQNSPYGMQSQVLFLADRFAVMTQAGGTVSLPFVVQNGQTFINEAFINYASITLAKVGSWYSANYVAGQTGTIMKADGTFEVNGAVSGQGRMQITNNRIISFDAQNRPAAVMGQRL

SEQ ID NO: 1655 - protein, 252 aa, Kosakonia cowanii
MSISSDVQKLEPGSRIRLIEVDGDAFGAGILRFHNETIPHTEAEITAAGGDASKLPPKSVWWQGLEYGAWPFELTGLSVSSDGQSARPTLTVANISGTIGALCRRFQGMAKAKVIIHETFAHYLDARNFSGGNPAANPNEERRQVYYIDRKSSSDDETVEFELSSPADLRGQLIPTRQIQPMCTWCMRGWYKTGNGCTYAGQNGWFDKDGNPVDDPSHDVCSGLLSTGCKPRFGANNELDFGGMPGASLLRG

SEQ ID NO: 1656 - protein, 159 aa, Kosakonia cowanii
MNAQADALETAPLNEHCAISEEKSWGKQCQRKPEIVKHLGVNGVEAKVKHEAVEVMCQHCAGKGEMATACRGCKGKGTVLDEKRTKLLGAPVMKVCGRCNGNRFSRLPITLARARIERIIPDLTSYQWYSGFGDVIALLVTKCWQEEAFAEVQLRKVTR

SEQ ID NO: 1657 - protein, 360 aa, Kosakonia cowanii
MQRPARYDANLPRNLTFRKRDKLYSWRNPITGQVIYLGRIDRREAIAQAIEANSYLYQNYIPSSLLERIKEMPTLTMAKWLERYDVILERRELKPNTMKVRRNQIERIRKEFGTIALSAVTTKDIAEFLETYIACDKKSMAAGLRSVLLDVFREALVEGHIERNPAEPTRTPAPKVKRERLLLEAYFTIRETAAANSVWAANAFDLALVTAQRREDIAMMKFTDIREDRLFVIQEKTGNKLAIPLDLKLEAADLHLKEVIERCRVNNPSEFLLYSPVRRGGRKPGPLTPDGLTQAFSDTRDITVLKFGPYPPSFHEIRSLSSRLYEKEKGEEFAQRLLGHKNLSMTKKYLDSRGAEYVTV

SEQ ID NO: 1658 - protein, 376 aa, Kosakonia cowanii
MAARPRKNNVSVPNLYPLYSRKVNKVYWRYKHPITGKFHALGTDEAEAIAIATEANTRLAEQRSRQIIAISDKIATSKGKAITTNTWLDRYWKIQGERLDSGDIKLNTYKQKAKPVALLRERVSMKLISSVDVRDIAEILEAYISDGQPRMAQVIRSVLIDVFKEAQHYGEVPLGYNPALATKQPRRRITRQRLNLEEWQKIFDIADANHKYMGNAMLLALVTGQRLGDISNMKFSDIWDDHLHIVQEKTGSKIAIPLALRLNAINWSLREVVARCRDYAVSPYLVHFFRATSQAERGAQVKSNTITMNFSKARDKAEINWGDGTPATFHEQRSLAERLYEAQGIDTQKLLGHKSPNQTARYHDDRGKEWVVIFQK

SEQ ID NO: 1659 - protein, 83 aa, Kosakonia cowanii
MKMINAAAVMLVSLMASGCASNTPPLCYNGAVVMKSRVVVPVFGIRKPVSTTEYLSGGSFGYQWVERSAFTDTSSCDRLPLTE

SEQ ID NO: 1660 - protein, 83 aa, Kosakonia cowanii
MKMINAAAVMLVSLMASGCASNTPPLCYNGAVVMKSRVAVPVFGIRKPVSTTEYLSGGSFGYQWVERSAFTDTTSCDRLPLTE

SEQ ID NO: 1661 - protein, 317 aa, Kosakonia cowanii
MQMFIAGTSFDAINAMAASYVLDVITITGTGSKTYSLAGVELTYAIVNDFMGGQLTGATYSVSVSGLTVSWNVNNAVTLIVYGSPVAGTQSDYFGFQLFQYLNGVRTVKLAPNYVPLCLREIIDVPAGARTVQTQVPAGNPVMCFHRHTGAAMDICWWKPATVSGYHALQFPTDGSNQTGCRVYVFSNILANIPDYGFYLYRDGQMVWHSNCLPLQVIPLTNGDITSDTPLAVSSSVTAHIFVPQDPAYPTGYSNFMCASAGNDGTRYKVQVGKVFQSTFISSPDEGRRMRGWACGGVGYIETQFYDQYYRYALGLA

SEQ ID NO: 1662 - protein, 221 aa, Kosakonia cowanii
MAKPDWGDLQHRFLSEHAKSGVSPKEWCEAQGLNYSSARRYIKKPAAQIAQKTAQKKVRNAQKEKDVNALVEKDGLTAQQRIFVAEYLKDRNATQAAIRAGYSAKTAEQIGYQLLQKTSVAVAIEKQQKASLMRTLASADEVLAQMWQLATFDANELSQYRRGACRYCHGFGHNYQWRDMVEFEEQRLKAIEKKGKEPVDVGGYRGNLQRQCQRINRVVER

SEQ ID NO: 1663 - protein, 150 aa, Kosakonia cowanii
MNPINFIKNYSHIIVIGLICVALWGLNARNAQLTATNERLEKLANSKDDQINDLRSKNDGLAASVGELVTAVRQQNQVMSQVTEQRAVTAQQNRKLQNEIKQYLETDKCAQSRVPDNAADRLRAAAKAAGGVPDNKPAANQPSGRTDLPH

SEQ ID NO: 1664 - protein, 358 aa, Kosakonia cowanii
MQNTNVAVADQNAVVNSNIALFDSQYLNAISTFAQIMAQGAATVPKHLQGNQADCMAVAMQAAQWQMNPFAVAQKTHLINGVLGYEAQLVNAVISRSGVLANRFEYEWYGPWEKVVGKFHIRKGEKGEYRVPGWTMADEAGIGIIIRATLKGEDHPRELDLLLAQARTRNSTLWADDPRQQIAYLAVKRWARLFCPDVILGVYTPDELEDRQEKEINPAPQQRVSVADIPAESTTNSAQESGTNIDGMADEFRDRIEAAQSVDQAKAVRVDIEAAKTALGSALFTELKNKAVRRYYLVDARNKVEAAINSLPQPDEPDAAEQFTKAEQALAAAKRHLGDELYDQFAVTLLDMKPEYVA

SEQ ID NO: 1665 - protein, 401 aa, Kosakonia cowanii
MKDARVSLMYFEARHVSKTIQKERSKVLDMGNLVHALALQPETLAAEFSIEPEIPEGAFTTTATIRECIDEYNASLPQQLSADDIKALLEAHNATLPAPLPLGAAVDETAESYMALPEEFQRIESDKKQTAAAMKACIKEYNATLPAPVKTSGSRDALLEQLAIINPDLVAQEAQKPQPLKVSGTKADLIQSVKAVKPDAVFADELLDAWRENPEGKVLVTRQQYATALNIQTALHAHPTAGKLLQHPDRAVETSYFGIDEETGLEIRVRPDLELDVDGVRIGADLKTISMWNIKQSGLRAKLHREIIDRDYHLSAGMYMETASLDQFFWIFVNKDEGYHWIAIVEASQELVELGILEYRATMRAIANAFDTGEWPAPITTDYTDELTEYDLRRLEALRAA

SEQ ID NO: 1666 - protein, 229 aa, Kosakonia cowanii
MNHELFHAVQSRDGEMLARMAGGSREQAKVINSDAERMVDLLFSQLKQVFPASTQTNLRSEADERTAKQQWIATFAENGIRSREQLVAGMQKARASVSPFWPSPGQFVAWCREGKGLLGVSPADVMAEFWKWRKLVFKYPTSEQYPWSQPLLYHVCLELRRRGVDRQMNEKELLSEAGHLLAHWEKRVAEGKPIPPVRRMLAAPHQDRGPTPAEMLMAEYKRRQAQGRV

SEQ ID NO: 1667 - protein, 226 aa, Kosakonia cowanii
MLAFFEREGMITTAGERRKGTVITITNYVFYAQKMDDLPAHNTAHNSEHNCAHNEPSNGAASEVDAAHNSEHKGALKPAHHEQEVILNTNVFNDRQKISKSLPDAAVQTPAGDKWGTTEDLQCAEWMLALRNLTKPSLKKPNLTTWANDIRMMRQLDGRTHREICQLFKWAAHDSFWHKNILSPAKLRKQWDTLVLHREDGSRKTTSDAPASDAHWNSPEAWKDFI

SEQ ID NO: 1668 - protein, 67 aa, Kosakonia cowanii
MTPVYDLVRRADGKNVFSFPAGGRYLVDTSNGLQSMRPLLDDEIIFTVESAARFLRKIGYQVIPPAA

SEQ ID NO: 1669 - protein, 112 aa, Kosakonia cowanii
MAVETFSWCPKVAAQADTSFRTRKAQFGDNYAQVAGDGINPVTPQWSVSFTGDEAYVLAIKAFLKRHAGWKSFIWKPPLEPAGLWRSESLQIATHGNDKYTLSTTFIQAYHP

SEQ ID NO: 1670 - protein, 163 aa, Kosakonia cowanii
MRLNAKELIAEARKIATAPTLPPAVAKLMTAMADRLDLQFVVLCESRNEAKQLAGENAQMKSAIKTHSESVHFYVGCGKDDPCSNDDVCYALEETPVTDAFLASLRAEAITDALENSSDYLDTDCVMDRHDISYQDAELRAAGAMEMHDSLVAVANHLRNKAG

SEQ ID NO: 1671 - protein, 471 aa, Kosakonia cowanii
MIYTTGSIAVNGNTLTGTGTNFTAAGSLIRNGCTVLALTSPVQAFQITAIDGATSLTVTPAASPDVPAGTKFAILLSDSLSVDGLAQDIAETFTMYQRYMGGFADVMNGASDVTITINGQAVTVPGQMSLAKKGANSDITSLSGLTSALSVEQGGTGAKNKADARQALSAASSGANSDITSLSGLTTALSIAQGGTGATSVSGARAALGIGAAASLGDALAAGAVLKREPGNVNTTLNNPTAIFNWLRSVGFGSYQFTAAQAGAIIRYYPTFYFNAGNLHALLQSNYSTGELISWGAVDNGGSWSFAQNILYGTANTTRATDGTIRAASPIVRIVKSKEYCTRPDIDELDFKWCGAGVANAEAEGVTVERPSTGVYLLKGSDGLARSGWQMSPPRDPQGSGDMGIVEAEQGEDGSLIIRLYKRRYVMTDDGDIEVAKGAPIDVPPTSWIDIRLDMPETSIWNQRNAASQKQ

SEQ ID NO: 1672 - protein, 236 aa, Kosakonia cowanii
MRDKTISAILAHAAQAFPAECCGVVIQKGRVEKYVACRNLATSPEEQFELSPKDYAAAEEQGTVVAVVHSHPGDGATTQPSELDMLMCDATEVPWVIASWPEGDIRTIMPRGDRPLTGRQFVLGHADCWSLIRDYFRTEHGIALPDYSVDRHWWEEGENLYMDNWHDCGFREFDGPPRPGDMVIMQVQASVPNHAGVLLEGNMLLHHLYGQLSQRIPYGGYYRDRTIKVLRYKDLM

SEQ ID NO: 1673 - protein, 112 aa, Kosakonia cowanii
MAVETFSWCPKVAAQADTSFRTRKAQFGDNYAQVAGDGINPVTPQWSVSFTGDEAYVQAIKAFLKRHAGWKSFIWKPPLEPAGLWRSESIQIATHGNDKYTLSTTFIQAYHP

SEQ ID NO: 1674 - protein, 675 aa, Kosakonia cowanii
MGRALGLIGGVPGLVMLGAGAWYAMYQSQEQARQSAQEYARTIDQVSQKTRAMNLPEADENRGKTIDALVEENRLIGEQQKAISAVKRQIDDLNKARTQPGITKDNDLNIVRALAILTDQLTVEENKLNLMREKSTSIQQVLEGIDRRRNDLIREQAWRQNAAYQSLLMMNGQHQTFNQLLGLGNQLLMARQGMTLAPLRVPQAEASQKQTEALEKSRRELALSRLKGEAKERARLGYAADELGLTADPQFQTNRLEYINNGLEEWRNNEANKKQPKGPKTDEEKAADAYKRMIKQQKEQIALQGQSTELARVKYQVVEGELSTLDKAQKAELMRNAALIDQVKLREQLRNYEVNLADSNASARAANDAQLIGYGQGTRFRERMQEQFNIRKEFEQKNTELLRQRQAGDIDETFYQQGLALNRRYLEERLRDQEGYYTASDAQRGDWLTGMSEGYANWVDEATDYSAMAADGMKQAMGGAVTTITDMLNGNIDSWKDWGMNVLKIIETVLVNMMVANAASSLGSLFSFGASSAATASSGTAIQSAASNFTFNAKGNVYDSPSLSAYSNGIYQTPQLFAFAKGAGVFGEAGPEAIMPLTRAPNGDLAVRAVGMPQFSGGGPSVSFGDINIQGGAQSTAGQGAAASAGRQLKDAIVTVINEQASMPGSPLWRLLKGA

SEQ ID NO: 1675 - protein, 1267 aa, Kosakonia cowanii
MTNTAIKGRKGGGTKTRTPVEAPDSIQSIARAKILVALGEGEFAGGLDGRSIYLGDASSYTPLQNADGSYNFNNVKYEFRSGTQDQSYIQGFPGVENELQVAYELKAAVPYVRSVSNTQLSALRIRLGWPSLLNQKDNGDKVGTRVEYAIDLSADGGTYVTVVNGAVDDKTTTLYERSHRIDLPKATTGWQLRVRRITPDSTTVNIVDSMRVEAVTEIIDAKLRYPNTALLYVEFDAKQFPNGIPQVVCNPKGRIIRVPDTYDPDTRTYSGTWEGGFKWAWTDNPAWIYYDIVLNERFGLGQRIDATQIDKWELYRIAQYCDQPVPDGKGGSGMEPRFRCNVYIQERNDAWTVLRDLAGIFRGMTYWGDNKLYVLADMPRDIWHIYNHASVVDGKFTFADPSETTRNTAALVNWSDPANHYKDTPEVVYDNDLAMRFDYSQLEMTAIGCTRQSEANRRGRWALLTNGIGEVVTFSTGMDVPPVGEVIGVAANELAGRVIGGRVSSVSGRNITLDRAADVKAGNRLFLNLPSGMAQARTVQAVNGNIVTVTTAYSETPEVECCWGVDADDLFIALFRVTGTRDNDDGTFEVTGATYSPDIYAAVDTGARLDERPVSVIPPGVQAPPENIVIDSYSTVSQNIAITTMRVAWDAVKGAIAYEAEWRRDSGNWVSVPRTSSLGFEVPGIYAGRYLVRVRAMNASDVSSIWATSAEVTLTGKVGNPPKPSGFTASETVVFGVELNWGFPANTDDTLKTEIQYSLTGTEDDAMLLADVPYPLRRYQQMGLKAGQVFWYRAQLVDRTGNESGYTDWVRGQSSSDVTDITEAVLAQIKDTDLFKDLIENAVESSQAVAELAEAVKQNAAGLAAAAGATRQTAEAIIGNALAIADVVVRQSAQQGANSARFEQLREVIATETESRVTDVIRLEAKTDKNAAGITEVRQALANETETRATAVDQLTAQTEENKASVTELTQTVTDLDSSTASRFEEISAEIAGIDSSDIRGGIQSNSIALITSTLAQVSQSTRMSVQYGANAAGIQRVDNVMADASQAVAESLRTLDASAGGGTANVTDFAKTMADFSQASATRINTLSVTVNGQQAAIVQNAQVSADINNNLNAMYSIKVGVDAAGRQYAAGMGIGVQNSPAGMQSQVIFLADRFAVMSQAGGTVSLPFVIQNGQTFINDGFFRDASIQFGKITDSLKSDNYAAGAAGWNLPKSGNAEFNQVTVRGAIYATNGNFNLTGPGNTTVINGLGVTVNLANGGLIRLGSW

SEQ ID NO: 1676 - protein, 252 aa, Kosakonia cowanii
MSISSDVQKLEPGSRVRLIEVDGEAFGAGILRFHNETIPHSEAEITAAGGDASKLPPKSVWWQGLEYGAWPFELTGLSVSSDGQSARPTLTVANISGTIGALCRRFQGMAKAKVIIHETFAHYLDARNFAGGNPGANPNEERKQVYYIDRKSSSDDETVEFELSSPADLRGQLIPTRQIQPMCTWCMRGWYKTGNGCTYAGQNGFFDKDGNPVNDPSQDVCSGLLSTGCKPRFGADNELDYGGFPGASLLRG

SEQ ID NO: 1677 - protein, 375 aa, Kosakonia cowanii
MAARPRKNNVSVPNLYPLYSRKVNKVYWRYKHPITGKFHALGTDEAEAIAIATEANTRLAEQRSRQIMAISDKIATSKGKAITTNTWLDRYWKIQGERLDSGDIKLNTYKQKAKPVALLRERVGMKLISSVDVRDIAEILEAYISDGQPRMAQVIRSVLIDVFKEAQHYGEVPPGYNPALATKQPRRRITRQRLNLEEWQKIFDIADANHKYMGNAMLLALVTGQRLGDISNMKFSDIWDDHLHIVQEKTGSKIAIPLALRLNAINWSLREVVARCRDYAVSQYLVHFFRATSQAERGTQVKSNTITMNFSKARDKAGIDWGDGTPATFHEQRSLAERLYEAQGVDTQKLLGHKSPNQTARYHDDRGKEWIKIAL

SEQ ID NO: 1678 - protein, 150 aa, Kosakonia cowanii
MNPINFIKNYSHIIVIGLICVALWGLNARNAQLTATNERLEKLANSKDDQINDLRSKNDGLAASVGELVTAVRQQNEVMSQVTEQRAVTAQQNRKLQNEIKQYLEADKCAQSRVPDNAADRLRAAAKAAGGVPDNKPAANQPVGGADLPH

SEQ ID NO: 1679 - protein, 252 aa, Kosakonia cowanii
MNLESLPKFYSPKSPKLNDQTPATGGVALTITDVMAAQGMVQSKASLGFNLFLAKMGIQDPAPAIDGLMQYALALKNPVLGKLSEKARGEVLPVLVQFAYADYSRSAASKSTCPHCEGKGVMREMQDVVKHPGVNGVEATVKHEAVEVMCQHCEGKGEVGTACRGCKGKGTVLDEKRTKLHGAPVRKVCGRCNGNRFSRLPTTLARARIEKIIPDLTSYQWYSGYGDVIALLVTKCWQEEAFAEAQLRKVTR

SEQ ID NO: 1680 - protein, 288 aa, Kosakonia cowanii
MRLNAKELIAEARVTAPTLPPAAAKLMTAMADRLDVQFVALCESRNEVKQLAAENAALKAERKQIAEIGELIQTQDNRITDQPFFAVMTKREMISSEDHDYDRICWVENQSGDYVEATETQHRRLEAIYQGRYEVREGWNRFAMKEIDVFVTGCFTEHGCKEYIRQNGHNLNKPFIYAFGSYRNHEYQKVRKFIMGIPQTPATDAILASLRAEARKQGAVFAANRMLAAWDAGFVEDTPENAADIARAILMSTEFMDEAPDGDFDRSFADEVLESIAAQQRSKSEVQS

SEQ ID NO: 1681 - protein, 341 aa, Kosakonia cowanii
VDGLAQDIAETFTMYQGYMSGFADVMKGVGDVTITINGEPVTVPGQKSLVKKGANSDITSLSGLTTALSIGQGGTGAKDAAGARKALQLGGAATLEVGTAAGTVAAGNDPRLTTLDGKSGGSITGRISMPAGAVGTYLSASQNAGVRQRVVNDTSATSAVGALTWGYNNGSGFQLDTTWGSVGLGASAWPYTFMMQTANETQFGARIWTFSMSSGDIICSGSGNQAGTFTFTKASNSDREIKHDIVYTDGQESYENVKKYSPTSFVYNDDPQGRKRRGVIAQDVQEIDPEYVRAILNPFTMKTSLSLDTNVMLLDVALALKVAISKIEALEDTVQQLRYGS

SEQ ID NO: 1682 - protein, 147 aa, Kosakonia cowanii
MIYTTGSIAVSGNTLTGTGTNFTAAGSLIRNGCTVLALTSPAQAFQITAINSATSLTVTPAASPAVPAGTKFAILLSDSLSVDGLAQDIAETFTMYQGYMGGFADVMKGVGDVTITINGEPVTVPGQKSLVKKGANSDITSLSGLTT

SEQ ID NO: 1683 - protein, 127 aa, Kosakonia cowanii
MIYTTGSIAVSGNTLTGTGTNFTAAGSLIRNGCTVLALTSPAQAFQITAINGATSLTVTPAASPAVPAGTKYAILLSDSLSVDGLAQDIAETFTMYQGYMSGFADVMKGVGDVTITINGEPVTVPGQ

SEQ ID NO: 1684 - protein, 236 aa, Kosakonia cowanii
MRDKTISAILAHAAQAFPAECCGVVIQKGRIEKYVACRNLAASPEEQFELSPEDYAAAEEQGTVVAVVHSHPGDGATTQPSELDMLMCDATEVPWVIASWPEGDIRTIMPRGDRPLTGRQFVLGHADCWSLIRDYFRTEHGISLPDYSVERHWWEEGENLYMDNWHSCGFREFDGPPQPGDMVIMQVQASVPNHAGILLEGNMLLHHLYGQLSQRMPYGGYYRDRTIKVLRYKDLM

SEQ ID NO: 1685 - protein, 243 aa, Kosakonia cowanii
MNKTIMSAIRAHALEESPRECCGFVIQSGRRQRYIPVSNTHENPTEHFRIDGELWANAEDIGTIIRVIHSHPGDGARPIPSDLDRQQCNNSGVVWGIYAPDSDEYAEIMPEAVPLIGRPFILGSHDCWGLIMDWHATQGVTLDDFRVDYPWWESQYLDNFYFDNWEQEGFIECDPSPGCMVIMQVESDKWNHAGIITEEGELLHHLYGQPSCITPYARGYFKDRTMICVRHRSLPEEIKPWRV

SEQ ID NO: 1686 - protein, 112 aa, Kosakonia cowanii
MAVETFSWCPKVAAQADTSFRTRKAQFGDNYAQVAGDGINPVTPQWSVSFTGDEVYVLAIKAFLKRHAGWKSFIWKPPLEPTGLWRSESLQIATHGNDKYTLSTTFIQAYHP

SEQ ID NO: 1687 - protein, 116 aa, Kosakonia cowanii
MAVETYKWPAQLGAGAIEYNQTIRASQFGDGYEQVAENGINSTAIQVPMIYVGKEVLINEIRSFLLAHTVKAFIITPPGEEKGLYRVVKDSVRKNQISSNAAELTFTIKRAYGVYA

SEQ ID NO: 1688 - protein, 1044 aa, Kosakonia cowanii
MEISQRTGTAFSDNAALFARAAASMREFGYSSDEVLKVTEAVSTGLKLSGASTAEAGSVITQFSQALAQGVLRGEEFNAVNEAGDRVIRALAAGMGVARKDLKGMADQGKLTIDKVVPALVSQLGTLQSEFGSMPETVSGSLQKVTNSFMAWVGGINQATGATQALSGGLNGVAGTLDSLTSSAVSGALNDVADNMSTITTVAGGLIGVGLAKYLGGIVTSATSATSALISAAKSEVALAVAQDKAAQSAVAASRADVYRAQQGLQRAKSADVQAAQQEKIAAAEARVTAAESRLTTAIASGTAAERVRARAALERARSGLAVIRNNDAQAVAERRLASAEAARDRNIANRVSTQNNLNSVTSVGTRLMGRALGLIGGVPGLVMLGAGAWYAMYQSQEQARQSAQEYARTIDQVSQKTRSMSLPEADDNRRKTVEALVEQNRLIDEQKKAISAVKRQIDELNKARGQSGITKDNDLNIVKSLGILTDQLTVEENKLYLMREKSASIQQVLEGIERRRNDWIREQAWRQNAAYQSLLMMNGQHEKFNQLLGLGNQLLMARQGMTLAPLRVPQAEASQKQTDALEKSRRDLALSRLKGEAKERTRLGYAADELGFVSTDPRYQTNRLEYINNGLEEWRNNEANKKQPKGPKTDEEKAADAYKRMIKQQKEQIALQGQSTELARVKYQVVEGELSTLDKAQKAELMRNAALIDQVKLREQLRNYEANLADSNASARAANDAQLIGYGQGTRFRERMQEQFNIRKEFEQKNTDLLRQRQAGDIDETFYQQGLALNRRYLEERLRDQEGYYTASDAQRGDWLTGMSEGYANWVDEATDYAGMAADGMKQAMGGAVTTITDMLNGNLDSWKDWGMNVLKIIETVLVNMMVANAASSLGSLFSFGASSAATASSGTAIQSAASNFTFNAAGNVYDSPSLSAYSNGIYQTPQLFAFAKGAGVFGEAGPEAIMPLTRAPNGDLAVRAVGMPQFSGGGPSVSFGDINIQGGAQSTAGQGAAASAGRQLKDAIVTVINEQASMPGSPLWRLLKGA

SEQ ID NO: 1689 - protein, 1238 aa, Kosakonia cowanii
MSDIATISLRVNTAELERGNKALDDFQQTAGSAANKADDLNSVFRAGADSQKKNTQSLKEQKEELQALLNKISPVNRAMDELETLQSKLAGFRGKGLLGNEDYSRFSAVLDTTRDKLFQVMEAETAEGQERLKLAQDTQRAAAAQDSFLKSLSEQAATFRASKSDVLEYRASILGLTQEAAPLIQQIRERELAIASEAVQTRIAAQELRDKQAAERQALAEASRLQSQNDNFVESLRNQALAIGKSRAEVLELKAAQMGLLQEAGPYIAALNAQEAATAQEAANKKVSAMQSRMLREAIAELEAAERAEASEMQRAQNIRDSFVRTLEEQATSIGKTRIELLEMKAAQLGVSQQAAPFIEKLREQDEAWKKGGISAGQYRQALRMLPTQFTDIATSIAGGMPLWMVLIQQGGQISDSFGGLGGLFQFIKEEVLGFKEATDDSSESLSENANSLAENAEHGRGMLSFLTPARLAVGGLVGVASLLAIAWYKGAQEASEFNKQLILTGNYAGKTAGQLSQLSRQIADDAGVTIGESSATLAKIVGSGRFDGNKLEVVARAAAAMEDAVGQSVDTTIANFQKLYDSPVKASVELNSQLHYLTAAEFQYIAALERRGEKEEAGQKAADSYSRAEQQRSQQVIDNLGLIDQVIRDVSDTWKAYWDAALGIGRKESTAEQLEVVRQRIKEITNQSRPGVFGMGNVGDGGAAKRELAALLQQERELGFVIKSQEGYNQKRAEFNKINQDGIDAQISFNKYLDAGTTQAEKRALAQKDLNKAIADNAKAVKATQGLPYEQRVKPLTPEQISKARAGIEKLYKDPKIPKAKGITVAAGDRAEDSAQAELLALQAQLKTLQDHRSVNDTISQQRKDLYAAESKFAVLEAAASTRQLSKQEKSLLASKNQVLQLAQQKALLGDQITAQEQLNKRMDTAQKYVTQMVEKQAGLASGATMSDRLAGRQASLSQLRSGWLNAGGGLNDDGYKRELKAANDYYAAEDKLRGDWMAGARKGWAEYLDAATNVYGSMQSVAQSALGGISDMLTNLVTTGTASFKSFAASMMKMIADVINRLLVAYTVQAAMGWISAGTSPAGSGAGQSFAVPSFRPAWNGGYIPEFDTGGYTGDGGKYQPKGVVHGGEFVFTKEATAAIGVNNLYAMMRGAQGYAEGGVVGRPPMLGLMSGSGNAAPVINTTVNVDASGNASSQSSNSGDAMGRAMAAEIQNAATLVVQKHLKPGGMIYNFTKGR

SEQ ID NO: 1690 - protein, 1253 aa, Kosakonia cowanii
MTTTIIKGRKGGGTKTRTPVEAPDSIQSIARAKILVALGEGEFAGGLDGRSIYLGDASSYTPLQNADGSYNFNNVKYEFRSGTQDQSYIQGFPGVENELQVAYELKAAVPYVRSVSSTQLSALRIRLGWPSLLNQKDNGDKVGTRVEYAIDLSVDGGAYDTVVNGAVDDKTTTLYERSHRIDLPKATTGWQLRVRRITPDSTTVNIVDSMRVEAVTEIIDAKLRYPNTALLYVEFDAKQFPNGIPQVVCNPKGRIIRVPDTYDPETRTYSGTWEGGFKWAWTDNPAWIYYDIVLNERFGLGQRIDATQIDKWELYRIAQYCDQLVPDGKGGSGMEPRFRCNVYIQERNDAWTVLRDLAGIFRGMTYWGDNKLYVLADMPRDLWHIYNHASVVDGKFTFADPSETTRNTAALVNWSDPANHYKDTPEVVYDNDLAMRFDYSQLEMTAIGCTRQSEANRRGRWALLTNGIGEVVTFSTGMDVPPVGEVVGVAANELAGRVIGGRVSAVSGRNITLDRAADVSAGNRLFLNLPSGVAQARTVQAVNGNIVTVTTAYSETPEAECCWGVDADDLFIALFRVTGTRDNDDGTFEVTGATYSPDIYAAVDTGARLDERPISVIPPGVQAPPENIVIDSYSTVSQNIAITTMRVAWDAVKGAIAYEAEWRRDSGNWVSVPRTSSLGFEVPGIYAGRYLVRVRAVNASDVSSIWATSAEVTLTGKVGNPPKPVGFTASETVVFGIELNWGFPANTDDTLKTEIQYSLTGTDDDAMLLADVPYPLRKYQQMGLKAGQVFWYRAQLVDRTGNESGYTDWIRGQSSSDVTDITEAVLAQIKDTDLFKDLIENAVDSSARVAELAEAVKQNADGLAAAAGANRQTAEAIIGNALAIADVVVRQSAQQGANSARFEQLREVIATETEARVTDVIRLEAKTEQNAAGITEVRQALSNESEARASAVDELTAKTEKNAANVTVLNQTVTDLDSSTASRFEEISAEIAGIDGSDIRGGIQSNSIALITNTLAQVSQSTRMSVQYGANAAGIQRVDTVMADASQAVAESLRTLDASAGGGTATATDFAKTMADFSQVSATRINSLSVTVNGQQAAIVQNSQAVADISGNLSAMYSIKVGVDAAGRQYAAGMGIGVQNTPTGMQSQVIFLADRFAVMSQAGGTVSLPFLVQNGQTFINEAFINYASITLAKVGSWYSANYVAGQTGTIMKADGTFEVNGAVSGQGRMQITNNRIISYDAQNRPAAVMGQRL

SEQ ID NO: 1691 - protein, 1260 aa, Kosakonia cowanii
METITGAKGGSQKQHTPVEQPDSAQSMARCRMLLALGEGEFAGGLDATRIFLDGTPLGNADGTMNFENVTWDFRPGTQTQTPIPGFAAVENETSIGVSLTKVAPWTRALSNIQIDAVLVRIGIPGLQQQQNNGDIVGTTVKYHIDLAVDGGAFSTVMTRTVTEKLSSLYELTHRINLPKATTGWQIRVVRDTDDSTSQLLQNKTQVQAITEVIDARLRYPHTALLYVSFNAKSFSDIPKISCKPKGRIIRIPSNYDPIARTYSGTWDGTFKWGWSNNPAWIWFDVLTEPRFGLGRRITADMLDKWELYRIAQRCDQKVPDGKGGSGTEPRFMFDVYIQSQADAWQVIKDIAAGFNGMTFWGNNMFNVVSDMPADTSKLQILNRAAVIGKPVYSSGSEKTRFSSALINFSDPDNHYQDRTTAVMFPDLVKQFKFKQTQITAIGCTRESEAQRRGGWAVYSNSLDRIITLQTGLDGYVYVPGTVFAFADERLSGRVYGGRVAGYNGGLKAVTTDRRTSAVAGDTLMIRTQGGTVESRVIQAVNGTQLVVSTPFKADPLPNAVFVIDAGQLRLQYFRVTNLTFNDEENTYSITGAEYNSSKYDAVDNNARLDTPPISLIPTGLVNQPTNIQVSSFESVRQGQRITTLIASWDAPLDKNGKPQADVISYQVQWKRGDNEWINVQETGLRNIEVPGIFEGDYLVRVRAINSGGASSLWASSLLTHLKGRAGDVPKPVGLSASEDVVFGINVTWGFPKDTGDTLSTELQYSLAADGSNPMLLAAVPYPQKLYQQMGLKAGQEFWYRARLVDRTGNQSAYTDWVRGQSSSDVTDITEAVLAQIKDTELFKDLIENAVEGSAKVAELAVAVKQNADGLAAAAGANRQTAEAISGHALAIADVVMRQSAQQGANSARFEQLREVIATETEARVTDVIRLEAKTDQNAAGITEVRQALSNESEARASAVDELTAKTEKNAANVTVLNQTVTDLDSSTASRFEEISAEIAGIDGSDIRGGIQSNSIALITNTLAQVNTRTLLSVQYGDNKAGIQRVDNVMADASQAVAESLRTLDASAGGGTANATDFAKTLADFSQVSATRINSLSVTVNGQQAAIVQNSQAVADISGNLSAMYSIKVGVDAAGRQYAAGMGIGVQNTPAGMQSQVIFLADRFAVMSQAGGTVSLPFLVQNGQTFINEAFINYASITLAKVGSWYSANYVAGQTGTIMKADGTFEVNGAVSGQGRMQITNNRIISYDAQNRPAAVMGQRL

SEQ ID NO: 1692 - protein, 257 aa, Kosakonia cowanii
MTALIDTAAMLAPGGKVRLVEVDASEFSGGIHRFHYSPFPHTPREIDEAQGDESKLGPKPVVFDGEVYDFWPFQLTGLALSTDQAAEPSLSVSNLDGHISALCLQFKDMVNAKVSIIDTYTVYLDAVNFPDHVNPTADPTMFTLQTFWLDTKTSEDDEVVTWALSSPADLQGLVIPTRQITSLCEWALRGQYRSGDGCTYNGTAYFDAKGNLVADPVLDVCGGCLSDCRKRFGAGLAEPNAAILDFGGFPATVLFTR

SEQ ID NO: 1693 - protein, 199 aa, Kosakonia cowanii
MEKRTVIKLSGSMAQRFGRTHRRVLSSASEVFRALSSTVDGFEDYLREARARGLDFVIFRDRRNISQEEFSLLGPGDELRIIPVIRGSKRAGIFQAVLGVALIAGGIALGPAGAGLIGKGVALNVALVGASMALGGVVQLLSPQVAGMRMRQDPDNKPSYAFGGPVNTTASGNPVSLLYGQREIGGAIISAGIYAEDQQ

SEQ ID NO: 1694 - protein, 199 aa, Kosakonia cowanii
MARLTTIRLYGALGARFGRVHKLAVQTSAEAVKALCINFDGLEDYLMNAKKNGMTFAVFRGKRNIGVQDFQELAGKSDIRIAPVMEGAKKAGMFQTILGAVMVVAGIVVGVATGWTGVGLTFGAGLIMSGASMMAGGIYQMLSPQPKGLQGRDDPDNKPSYAFGGSVNTLAMGNPVPPLWGEREIGGAIISAGIVAEDI

SEQ ID NO: 1695 - protein, 252 aa, Kosakonia cowanii
MNLESLPKFYSPKSPKLNDQTPATGGAALTITDVMAAQGMVQSKASLGFNLFLAKMGIQDPAPAIDGLMQYALALKNPVLGKLNEKARGEVLPVLVQFAYADYSRSAASKSTCPHCEGKGVVREMQDVVKHHGVNGVEATVKHEAVEVMCQHCAGKGEVGTACRGCKGKGTVLDEKRTKLHGAPVRKVCGRCNGNRFSRLPTTLARARIEKIIPDLTSYQWYSGYGDVIALLVTKCWQEEAFAEVKLRKVTR

SEQ ID NO: 1696 - protein, 381 aa, Kosakonia cowanii
MAARPRSHKISVPNLYCKLDKRTGKIYWQYKHPLSGRFHSLGTDEAEAKQVATEANMIIAEQRTRQILSVNDRLARMKGKRTDITVTEWLDKYMAIQEERLKHNELRPNSFKQKNKPVRLFREHCGLQHLKDITTLDIAEITDAIKAEGHNRMAQVVRLVLIDVFKEAQHSGHVPPGYNPAQATKQPRNKVTRQRLSLDEWKKIYASAEQQEPYLQCGMLLALITGQRLGDICNMQFKDIWDDMLHVEQEKTGSRLAIPLDLKCDAIDLSLRDVISKCRDAVISKYLVHFRHTSAQATRGDKVSTSSLTTTFRKARDKSGLNWDKGTAPTFHEQRSLSERLYREQGVDTQKLLGHKTQKMTDRYNDDRGKDWVIVSAKTAS

SEQ ID NO: 1697 - protein, 360 aa, Kosakonia cowanii
MQRPARYDANLPRNLTFRKRDKLYSWRNPITGQVIYLGRIDRREAIAQAIEANSYLDQNYIPSSLLQRIKEMPTLTMAKWLERYDVILERRELKPNTMKVRRNQIETIRKEFGTIALSAVTTKDIAEFLETYIACDKKSMAAGLRSVLLDVFREALVEGHIERNPAEPTRTPAPKVKRERLLLEAYFTIRETAAANSVWAANAFDLALVTAQRREDIAMMKFTDIREDRLFVIQEKTGNKLAIPLDLKLEAADLHLKEVIERCRANNPSEFLLYSPVRRGGRKPGPLTPDGLTQAFSDTRDVTVLKFGPYPPSFHEIRSLASRLYEKEKGEEFAQRLLGHKNLSMTKKYLDSRGAEYVRV

SEQ ID NO: 1698 - protein, 83 aa, Kosakonia cowanii
MKIINAAAVVLFSILATGCASNTPPLCYNGAVVMKSPVAVPVFGIRKPVSTTEYLSGGSFGYQWVERSAFTSTSSCDRLPLTE

SEQ ID NO: 1699 - protein, 83 aa, Kosakonia cowanii
MKIINAAAVVLVSILATGCASNTPPLCYNGAVVMKNRVSVPVFGIRKPVSTTEYLSGGSFGYQWVERSAFTNTSSCDRLPMTE

SEQ ID NO: 1700 - protein, 317 aa, Kosakonia cowanii
MQMFIAGTSFDAINAMAASYVLDVITITGTGSKTYSLTGVELTYAIVNDFMGGQLTGATYSVSVSGLTVSWNVNNAVTLIVYGSPVAGTQSDYFGFQLFQYLNGVRTVKLAPNYVPLCLREIIDVPAGARTVQTQVPAGNPVMCFHRHTGAAMDISWWKPATANGYHALQFPTDGSNQSGCRVYVFSNILANIPDYGFYLYRDGQMVWHSNCLPLQVIPLTNGDITSDTPLAVSSSVTAHIFVPQDPAYPTGYSNFMCASAGNDGTRYKVQVGKVFQSTFISNPDEGRRMRGWACGGVGYIETQFYDQYYKYALGLA

SEQ ID NO: 1701 - protein, 317 aa, Kosakonia cowanii
MQMFIAGTSFDAINAMAASYVLDVITITGTGSKTYSLAGVELTYAIVNDFMGGQLTGATYSVSVSGLTVSWNVNNAVTLIVYGSPVAGTQSDYFGFQLFQYLNGVRTVKLAPNYVPLCLREIIDVPAGARTVQTQVPAGNPVMCFHRHTGAAMDISWWKPATANGYHALQFPTDGSNQTGCRVYVFSNILANIPDYGFYLYRDGQMVWHSNCLPLQVNPLTNGDITSDTPLAVSSSVTAHIFVPQDPAYPTGYSNFMCASAGNDGTRYKVQVGKVFQSTYISSPDEGRRMRGWACGGVGYIETQFYDQYYRYALGLA

SEQ ID NO: 1702 - protein, 335 aa, Kosakonia cowanii
MAKPDWGDLQRRFLSEHAKSGVSPKEWCEAQGLNYSSARRYIKKHAAQSAQKSAQKKVRNAQKEKDVNALVENDGLTAQQRIFVAEYLKDRNATQAAIRAGYSAKTAEQIGYQLLQKTSVAVAIEKQQKASLMRTLASADEVLAQMWQLATFDANELSQYRRGACRYCHGFGHNYQWRDMVEFEEHRLKAIEKKGKEPVDVGGYGYDHNREPNPACPRCNGDGIGQPYFADTRKLPPVSRLAYSGIKLGKNGVEITAISRERMYEAVMKRLGLADSEFAQQLQQIEIERRQLEVEKLRKELAADPEDEVPLPVAININVADARVRKDDDGDIADP

SEQ ID NO: 1703 - protein, 150 aa, Kosakonia cowanii
MNLINLIKNYSHVIVIGLICVALWGLNTRNAQLTATNERLEKLANSKDDQINDLRSKNDGLAASVGALVTAVRQQNEVMSQVTEQRAVTAQKNRKLQNEIKQYLEADKCAQSRVPDNAADRLRAAAKAAGGVPDNKPAANQPAGRTDIPH

SEQ ID NO: 1704 - protein, 375 aa, Kosakonia cowanii
MANELINIKANLDTELVPVKSLLPAHVSYDRFTNAAAVALATNRDLFNADRQSVINALTACAKDGLIPDGREAALVTFKKKQPDGSKIPVAQYMPMIDGVMKRARQSGEISVIATRVVYENDTFRVWLDDEGEHVLYEPCLGERGTMRGAFAYAKMKSGELQYEWLNIDDINKVRAASRNSDSGPWVDWYESMSRKSAAHRLCRRLPNNSEIMEMLERGTEMVWQKEKDITPPRATLDVITADVNSDKPEVANAAQESTANIDVLADEFRDRIEAAQYVDNAKAVRVDIEAAKTALGSALFTELKNKAVRRYYLVDARNKVEAAINSLPQPDEPDAAEQFTKAEQALAAAKRHLGDELYDQFAVTLLDMKPEYVA

SEQ ID NO: 1705 - protein, 1132 aa, Kosakonia cowanii
MEFFYVVKATQKSGKQDAVIWFTAKSEARAALTLDVELEEAGIETGRGKDYAKPIHTDFPIVNDLPEEGVVDFTWCDRYQLADDQRTWNVIPGAAPQDETDLAPANTIYDADFHATPVTATDTVDAASISQLENRIPSVRFAVHLLGDKYHSEISQEQQIVANELAMDEANVYFQNLLQAKNEVPDMSELSLHAEWKLVQAIKDVFPQHKEHEPALLAAFMSSWVKTEVSERAQLIEDWLGGRLPVPELITTSDLGDDAPVSNAEDQQDATPEEVAQAHVQAFRDRDITELHAVPTLSFRHRLLAQFITEKEYAYHIDNEQLSTVRQLEMDTDNSYVQNLLLAAENVEGMKSLRDFEFWRLTDAVKRVFPSDKATPDLSLMLQFMKAWKTTDYIDRGLLAKEWINGNRVSTIQRTDTGTNAGGGIKTDRNADYEHTLDTLDIEIACATLPMDFDIYNIPGSIHRRAKDIVAAKESPWKEWSAALRKTAGILDYSRAAIFALIREASSGITPFPDRMTAYISATLNEYKHDTPEARILAAARQIDSAAVDARAIEGTEPSHQLVTTAQPEVSNLGGGMFSIHGLLGEKANPVINTPSNEVEKQEVENVDHVQMEETDPSKVEACNALPAVEVADEAAAQTVCVSPAGILAAATPELTSNVAADLDQNIDALSQDEPELPPTEPETTEIEPVADISEPEAAAKEWPAYFEPGRYEGLPNDVYHAANGISSTQVKDARVSLMYFEARHVSKTIQKERSKVLDMGNLVHALALQPETLAAEFSIEPEIPEGAFTTTATIRECIDEYNASLPPQLSADDIKALLEAHNATLPAPLPLGAAVDETAESYMALPEEFQRIESDKKQTAAAMKACIKEYNATLLAPVKTSGSRDALLEQLAIINPDLVAQEAQKPSPLKVSGTKTDLIQALKAVRPDAVFADELLDAWRENPEGKVLVTRQQYATALNIQAALHAHATAGKLLQHPDRAVETSYFGIDEETGLEIRVRPDLELDVDGVRIGADLKTISMWNIKQSGLRTKLHREIIDRDYHLSAGMYMETASLDQFFWIFVNKDEGYHWIAIVEASPELVELGIMEYRATMRAIANAFDTGEWPAPITDDYTDELTDYDLRRLEALRDQA

SEQ ID NO: 1706 - protein, 225 aa, Kosakonia cowanii
MGFALPNGATVFVGSKLATPVAVTGVSNAAGAVFTVANGHGLAVGDVVLVSSGWALIDSLVARVTAQTTTSVTIGVINSTDTNFFPAGSGTGSLSKVAEWTEIPQITEVSQSGGDQQYTQIQFLADDRQRNLATYKAAKSQTFTVAHDSTLPIYAVLSAADRSGETLPLRMYVPKAKETRYWSGKPSFDPQPTTAPNAVETVQPAFAIQSRDITFYKDAAPQAAA

SEQ ID NO: 1707 - protein, 202 aa, Kosakonia cowanii
MADNQAFIASINAFVRQAKERQEEMVRVIGIKILARLVQMSPVGNPELWAVNQTAAAYNAAVAEHNSLLRQNPDNLTKAGRLRPGRKVKDGMDLKAPPGYTGGRFRGNWQVSFDARTTDETGRVDKAGHLTMTAGNVTLGLFKVGVRDIYFCNNVPYSYRLEMGHSSQAPGGMVRITAAEFQRYFSQAVSEVKNDTGHHNGA

SEQ ID NO: 1708 - protein, 160 aa, Kosakonia cowanii
MIITDITSPAMNSYAGEVDLKAFADLRDITLPEKIAPLLIRAMDYLEGLDWAGWRSEPKQPLAWPRAGIELDGYELPDGEVPPQVVTAQCMLAVEAMDGDLLGSVREAAVKSERVEGAVTTTYAVADGEVFRPSYPAVMALLGELAGGRGYAVNAFAERA

SEQ ID NO: 1709 - protein, 103 aa, Kosakonia cowanii
MATKFQLQPKPTFKADVTIPRAGEDDGVLTFTFRHKPVKELAALEKIEGKTAIDFLTEITESWALPDEFSRENLEMLLDNYPGAMKAIVGTYYRELTGNREKN

SEQ ID NO: 1710 - protein, 136 aa, Kosakonia cowanii
MIPDITTALESMLGLWADGEGVRVSWDNIQFDPPGDGLYLISHDMPAQPYSIDMAGGCRVYPGVYQVTVVAPAGGGKSQARMLARRVAGLFPENQEISGDGFTAWVTSPPAIYPGIADGVSYSIPVSINYRADISA

SEQ ID NO: 1711 - protein, 116 aa, Kosakonia cowanii
MPVNYTRIKATSTRLLTENGAAYPVKRKGTVTVIGGVEHREPDKTFTAIGVRTEYRPGEIDGTVIINGDIRIVFTADTELRTGDMVDVDGKWYRIEKPNPVNPGKLLLCYRAQLRA

SEQ ID NO: 1712 - protein, 468 aa, Kosakonia cowanii
MANNDITWVRPEHRAASAAWKKIRDFCKGAEAVKEPGNNYLPLLDSTDKSMRNRKRNEDYLQRAVFYAITGNTKIGLLGLAFRKDPTFSAPEKLSYLLKNADGAGTSIYQQSQLVTENVLEVARDGLYVDYAEGSGQAIILRYLAENIINWRTKRINGRDQLVLVVLRECVEQEDGYAFKDEIQYRELALEEGRFICRVWRRSADAGSAVYAVTSEYQPKPKGKDSWDEIPFTFVGAQNNDPTIDDSPLAALVEINHGHFRNSADYEDSVWFCGQVQPYMTGLDEGWRDHLEKKGVKIGSRSPLLLPREGNFGYAQAQPNMLAKEAMDSKRDYMVQLGARLIEQNAAVKTATQSSSEQTSSTSVLGICVSNVSEAYSLAIGWCAKYLGVGEQQAAYAINQEFIAKVAESGMVTAIVNAWQSGAIRDTDMIRALQKLDLINPADSPDDIIDELHNPTPTLIGGNNGNGK

SEQ ID NO: 1713 - protein, 436 aa, Kosakonia cowanii
MTGISPTLNVPQARFLAMSHKFKAYVAGFGSGKTWVGCGGICKGMWEHPKINQGYFAPTYPQIRDIFYPTVEEVAFDWGLKVQINESNKEVHFYAGRQYRGTTICRSMEKPATIVGFKIGNALVDELDVMPALKAQQAWRKIIARMRYKVAGLRNGIDVTTTPEGYKFVYQQFVKAVRDKPELATLYGLVQASTFDNEANLPDDYIPSLLASYPPELIKAYLRGHFTNLTSGTIYHQFDRRLNNCTDEEQPGEPLFIGMDFNVGKMAAIVHVKREGLPRAVRELVKVYDTPAMIKRIQEEFWRYEGGRYVASRQIYIYPDASGDSRKSNCASLTDIAQLREAGFSVIVNASNPPVKDRINSMNAMFCNALGERRYLVNVQRCPVYTESLEQQVWDKNGEPDKKADNDHPNDGGGYFIVKDYPIVKPAYSITMDTTF

SEQ ID NO: 1714 - protein, 341 aa, Kosakonia cowanii
MNTAKILNFPGNDPGQLRSNRMENQRTGFIPLYRSVLKQSWSKDVFLRTLWENLLLSAARQPYTANFKGRQWPLLTGQLVTTSADLGLSLCDREGKPCSRHAVDRMLEVFEREGMISRSGEKRKGSVITITNYAEYAQKMDDLLAHYPEHISALNAEHGEASNGEASDGGAAHKTEHLAERFPENHEQQSNNNNKNIKRSTSENSGESSDKPGKKLPVLKPDAAIQSGGKWGTSEDLRCAEWLFSEVQRIAPSARQPTWASWANDIRLMRERDGRTHKEISQLFRWACNDSFWQGNVLCPATLREKWTQLDIKRNKQPAGSASVKPKIDVNNTDWIHGVKL

SEQ ID NO: 1715 - protein, 317 aa, Kosakonia cowanii
MATTVNNDLVIYDDLAQTAFLERRQDNLEVFNTSSNGAILLDNELIEGDFRKRAFHKVGGSIESRDVNSTGKVNGKKIGAGEAVSVKAPWKYGPYETTEEAFKRRGRTVDEFSEVIGVDVADATLEGYVKYGLKALTAAIGANTDMVVTADIETDGKKTLTRGLRKYGDKFNRVVLFVMHSATYFDIVDEAIASKIYEEAGVVVYGGQPGTLGKPVLVTDTMDAAAILGLVAGAVTVTESQAPGFRSYDINDQENLAVGYRAEGTVNVELLGYSWDTAKGENPDLTAIGTAGNWKKHFTSNKSTAGVLIKLGAASGE

SEQ ID NO: 1716 - protein, 361 aa, Kosakonia cowanii
MATVNEMLRDEAIAHTVWISRYSTGVANRMVKLLNDSDAELTARLLLAMDSLPTSQFTVSRLESMLGSVRELNQQAIAGMQTSLEDELLQLAGHEAGYQLSLFDSLLPQRVKERYPLQSITPEQLYAAAMAQPFQGRLLSEWADNLEADRMARVVNAMRRGYLQGDTTETIARQVRGIASKGYKDGALQLSRTNAASITKTAVNHLAATARTNFAEANGDVLKGKQWLSTLDNKTTPTCIIRDRLRYTLDNKPVGHKVPYLQGPGKIHFCCRSTETLITKSWRELGIDSNELDEDTRSSMDGQVPADTTYLDWLARQSLRRQDEILGPERAALYRAGELKLGEMFTDKGEWISLARLKELS

SEQ ID NO: 1717 - protein, 54 aa, Kosakonia cowanii
MGTQWRTGMGGITGLDYNVLPWLMKLNGVEDEATALTDIRVMESVALKIMHQGA

SEQ ID NO: 1718 - protein, 240 aa, Kosakonia cowanii
MRMNAKELIADARVTAPTLPPAAAKLMTAMADRLDLQFVVLCESRNEAKQLAGENALMKSAIKTHSESVHFCVGCGKDDPFSNDDVCYALEETPATDAFLASLHAEGVEILRQHPAIQLCSLTHVCDEVAAQLRSQSAASPAPLSAAITDIISERQRQQSAEGWTQEHDDTHDKAEMVLAAISYLMAVVNPNASQGWWPWDIRSWKPSSGRRDLVKAGALIAAEIERIDRQAAQVKGVQL

SEQ ID NO: 1719 - protein, 422 aa, Kosakonia cowanii
MIYTTGSIAVSGNTLTGTGTNFTAAGSLIRNGCTVLALTSPAQAFQITAINSATGLTVTPTASPAVPAGTKFAILLSDSLSVDGLAQDIAETFTMYQRYMGGFADVMNGTGDVTIAINGEPVTVPGQKSLVKKGANSDITSLSGLTTALSIEQGGTGAKDASGARKALQLGGAATLEVGNVPGTVAAGNDPRLTTLDGKSGGSITGRISMPSGAVGTYLSAAQNAGVRQRVVNDASATSAVGALTWGYNNGSGFQLDTTWGSVGLGASAWPYTFMMQTANETAFGARIWTFSMSSGDIICSGSGNQAGTFTFTKASNSDREIKHDIVYTDGQESYENVKKYSPTSFVYNDDQQGRKRRGVIAQDVQEIDPEYVRAILNPFTMKTSLSLDTNVMLLDVALALKVAISKIEALEETVQQLRYGS

SEQ ID NO: 1720 - protein, 236 aa, Kosakonia cowanii
MRDKTISAILAHATQAFPAECCGVVIQKGRVEKYVACRNLATSPEEQFELSPEDYAAAEELGTVVAVVHSHPGDGATTQPSELDMLMCDATEVPWVIASWPEGDIRTIMPRGDRPLTGRQFVLGHADCWSLIRDYFRTEHGIPLPDYSVDRHWWEEGENLYMDNWYACGFREFDGPPRPGDMVIMQVQASVPNHAGVLLEGNMLLHHLYGQLSQRIPYGGYYRDRTIKVLRYKDLM

SEQ ID NO: 1721 - protein, 112 aa, Kosakonia cowanii
MATETFSWSPRVGAQNDTSLRTRKAQFGDNYAQVSGDGLNPVTPQWSVSFTGDEEYVLAIKAFLTRHAGWKSFIWKPPLESAGLWRSESLQIATHGADLYTLSTTFIQAYHP

SEQ ID NO: 1722 - protein, 711 aa, Kosakonia cowanii
MAWQFAAENAGISGDQIADIFKDIGDKIGDAVLNKSGDAVDALNSLGLSAEKLSRVTPDKQLLAIGEALSKINTNAEKTTILESLGNDLSRLLPLFDNNNKELLQFIHLAKDYGVAPDQKSIDDLLRVNEIFQDLEAQASGLKMEIAAGLAKVDISPLQKGLDDLKKTFTDPAVLQGLSELVGGVASLAGGLGKAASELGRLIENFQGGQRIAANASRVEIERRIKNLEADLNDKGFLAGVNRIGMDTDSRRQELKELYVRLNEVKNFQTSLPVTAAKVSTSTSAGFQLGKDETNGKVKTDSAGKKLENAFKSAETAYLRQIALIDTTGKKSAEVTELQKLQFDVVDGKLLGLNDTQRQRLEQLATEVDRLNAVKKANEENLKVAEYVANLQRENANNAASLNADIVGAGLGDKARERMRQRLDVEREFNEKRADLEQRYQRGDIKSQEEFDRYTSELEKAQSQRLNDYADYYQQIDSLDADWISGARDGLANWVDDASNYSLQAASAMQSALSGINSNLVNMLNGSKASWKDWGVSVLKIIQNVLVNMAMAKGISSLGSLFSFGAASAATASSGTAIQEAASNFTFNAKGGVYESSDLSKFSNSIVNSPTMFAFAKGAGLMGEAGPEAIMPLTRAADGSLGVRALDTAQGQGAGVSVSIGDINFSSPAQQPASQGIASAAGRQLTDAILRTVNEEVSRPGTPLWRAIKGG

SEQ ID NO: 1723 - protein, 1253 aa, Kosakonia cowanii
MTNTAIKGRKGGGTKTRTPVEAPDSIQSIARAKILVALGEGEFAGGLDGRSIYLGDASSYTPLQNADGSFNFNNVKYEFRSGTQDQSYIQGFPGVENELQVAYELKAAVPYVRSVSNTQLSALRIRLGWPSLLNQKDNGDKVGTRVEYAIDLSVDGGAYVTVVDGAVDDKTTTLYERSHRIDLPKATTGWQIRVRRITPDSTTVNVVDSMRVEAVTEIIDAKLRYPNTALLYIEFDAKQFPNGIPQVVCNPKGRIIRVPDTYDPDTRTYSGTWEGGFKWAWTDNPAWIYYDIVLNELFGLGKRIDATQIDKWELYRIAQYCDQLVPDGKGGSGMEPRFRCNVYIQERNDAWTVLRDLAGIFRGMTYWGDNKLYVLADMPRDIWHIYNHASVVNGKFTFADPSETTRNTAALVNWSDPANHYKDTPEVVYDNELAMRFDYSQLEMTAIGCTRQSEANRRGRWALLTNGIGEVVTFSTGMDVPPVGEVIGVAANELAGRVIGGRVSAVSGRNITLDRAADVKAGNRLFLNLPSGVAQARTVQAVNGNIVTVTTAYSEAPEAECCWGVDADDLFIALFRVTGTRDNDDGTFEVTGATYSPDIYAAVDTGARLDERPVSVIPPGVQAPPENIVIDSYSTVSQNIAITTMRVAWDSVKGAIAYEAEWRRDSGNWVSVPRTSSLGFEVPGIYAGRYLVRVRAVNASDVSSIWATSAEVTLTGKVGNPPKPVGFTASETVVFGIELNWGFPAGTDDTLKTEIQYSLTGTDDDAMLLADVPYPLRKYQQMGLKAGQVFWYRAQLVDRTGNESGYTDWIRGQSSSDVTDITEAVLAQIKDTDLFKDLIENAVEGSQAVADLAEAVKQNADGLAAAAGANRQTAEAIIGNALAIADVVVRQSAQQGANSARFEQLREVIATETEARVTDVIRLEAKTDQNAAGITEVRQALANETEARATAVDQLTAQTEENKASVTQLTQTVTDLDSSTASRFEEISAEIAGIDGNEIRGGIQSNSIALITTTLAQVSQSTRMSVQYGANAASIQRVDTVMADASQAVAESLRTLDASAGGGTANATDFAKTMANFSQVSATKINSLSVTVNGQQAAIVQNSQAVADISGNLSAMYSIKVGVDAAGRQYAAGMGIGVQNTPAGMQSQVIFLADRFAVMSQAGGTVSLPFLVQNGQTFINEAFINYASITLAKVGSWYSANYVAGQTGTIMKADGTFEVNGAVSGQGRMQITNNRIISFDAQNRPAAVMGQRL

SEQ ID NO: 1724 - protein, 252 aa, Kosakonia cowanii
MSISSDVQKLEPGSRVRLIEVDGEAFGAGILRFHNETLPHTEAEIIAAGGDASKLPPKSVWWQGLEYGAWPFELTGLSVSSDGQSARPTLTVANISGTIGALCRRFQGMAKAKVIIHETFAHYLDARNFSGGNPAANPNEERRQVYYIDRKSSSDDETVEFELSSPADLRGQLIPTRQIQPMCTWCMRGWYKTGNGCTYSGQNGWFDKDGNPVDDPSKDVCSGLLSTGCKPRFGANNELDYGGFPGASLLRG

SEQ ID NO: 1725 - protein, 199 aa, Kosakonia cowanii
MEKRTVIKLSGSMAQRFGRTHRRALSSASEVFRALSSTVDGFEDYLREARARGLDFVIFRDRRNIGQEEFSLLGPGDELRIIPVIRGSKRAGIFQAVLGVALIAGGIALGPAGAGLIGKGAALNIALVGASMSLGGVVQLLSPQVAGLRMRQDPDNKPSYAFGGPVNTTASGNPVPLLYGQREIGGAIISAGIYAEDQQ

SEQ ID NO: 1726 - protein, 252 aa, Kosakonia cowanii
MNLESLPKFYSPKSPKLNDQTPATGGVALTITDVMAAQGMVQSKASLGFNLFLAKMGIQDPAPAINGLMQYALALKNPVLGKLSEKARGEVLPVLVQFAYADYSRSAASKSTCPHCEGKGVVREMQDVVKHPGVNGVEATVKHEAVEVMCQHCAGKGEVGTACRGCKGKGTVLDEKRTKLHGAPVRKVCGRCNGNRFSRLPTTLARARIEKIIPDLTSYQWYSGYGDVIALLVTKCWQEEAFAEVQLRKVTR

SEQ ID NO: 1727 - protein, 83 aa, Kosakonia cowanii
MKIINAAAVVLFSILATGCASNTPPLCYNGAVVMKNRVPVPVFGIRKPVSTAEYLSGGSFGYQWVERSAFTDTSSCDRLPLTE

SEQ ID NO: 1728 - protein, 317 aa, Kosakonia cowanii
MQMFIAGTSFDAINAMAASYVLDVITITGTGSKTYSLAGVELTYAIVNDFMGGQLTGATYSVSVSGLTVSWNVNNAVTLIVYGSPVAGTQSDYFGFQLFQYLNGVRTVKLAPNYVPLCLREIIDVPAGARTVQTQVPAGNPVMCFHRHTGAEMDICWWKPATVNGYHALQFPTDGSNQTGCRVYVFSNILANIPDYGFYLYRDGQMVWHSNCLPLQVNPLTNGDITSDTPLAVSSSVTAHIFVPQDPAYPTGYSNFMCASAGNDGTRYKVQVGKVFQSTFISSPDEGRRMRGWACGGVGYIETQFYDQYYRYALGLA

SEQ ID NO: 1729 - protein, 137 aa, Kosakonia cowanii
MSRVFKSHSTDPYEVEVEMKRMPDKDAGFWASLIAWLYSHKTEWGYAGVAGMFSLLRSAYAQSSWSKRVLDAVSCSALAFFAAPTLQVVGGVLNWNVPDTAAQVFAVYIGYVGNDYISEKLRGWISRRTGDNSENQS

SEQ ID NO: 1730 - protein, 150 aa, Kosakonia cowanii
MNPINFIKNYSHVIVIGLICVALWGLNARNSQLTATNDRLEKLANSKDDQINDLRSKNDGLAASVGELVTAVRQQNQVMSQVTEQRAVTAQQNRKLQNEIKQYLEADKCAQSRVPDNAADRLRAAAKAAGGVPDNKPAANQPAGRADLPH

SEQ ID NO: 1731 - protein, 182 aa, Kosakonia cowanii
MRMTAKELIADARLTGPTLPPAVAKLMTAMADRLDLQFVALCESRNEVKQLAAENAALKSNLMFWDAEDPEVPYCSPEDIANEIMLGYNEEFDVQVAARLPNRKYRVCKLTESEREIELVDGGDIATPATDAYTAPLRAEGVDGAIERIMVHTNHQHAGVAQALHILRMYAAQLRSKSEVPS

SEQ ID NO: 1732 - protein, 422 aa, Kosakonia cowanii
MLYNSGTIAINGNTATGTGTNWTAPASQVRAGQTIIVMSNPVQLFQISSVNSATSLTVTPAASPALSGQKYGILVSDIISVDGLAQAMSQLIKEYDENISGWEAFATTTANQNITVTINGATVNIPGIGGLARKGTNSDITELKGLTTAITLAQGGTGAKTAAGARTSLGLGSMATQSSDAVNITGGSGTFTSLSSDAVTITGGTASLGTIETKAGAEQPLVIRTNPSGLGYIRFRDASENPLAYLGFGASGAQHFILASNIGGNSVTLNTTGAVTVKAGGANYAFQTNGTATGQLWQSTSDVRIKKDIKPITNAREVISAITGYTFKKRYNLYEVAEPLYTEEAGILAQELELVAPEAVSKNDFGAHDLENNPIDDLRAVNYAGITPYLIELAKLHEAEITDLKGEMAQLKALVSALAQGS

SEQ ID NO: 1733 - protein, 236 aa, Kosakonia cowanii
MRQKTIDAILAHAAAEYPRECCGVVAQKSRVERYFPCRNLAAAPEDNFVLCPEDYAAAEDWGTVIAIAHSHPDATTQPSELDKAQCDATLLPWHIVSWPEGDLRTIQPRGELPLLERPFVLGHFDCWGLVMSYYRQMHGIELHDYRVDYPWWEKTYPDNFYEECWYECGFREFNGPPKPGDMVIMQVQADKWNHAGILLEGNMLLHHLYGHLSQRVPYGGYWQERTMKILRYTSLC

SEQ ID NO: 1734 - protein, 113 aa, Kosakonia cowanii
MMAIEEFTWCPRINAQQEVTFRTRTAQFGDSYKQVSGDGLNPRTQKWTMEFTGDEGYIAEIKAFLDRHGGTRSFSWRPPLEPLGLYRCNTYTPTPLGARKYNLSATFEQAFAP

SEQ ID NO: 1735 - protein, 623 aa, Kosakonia cowanii
MTFWGNNMFNVVSDMPADTSKLQILNRAAVIGKPVYSSGSEKTRFSSALINFSDPDNHYQDRTTAVMFPDLVKQFKFKQTQITAIGCTRESEAQRRGGWAVYSNSLDRIITLQTGLDGYVYVPGTVFAFADERLSGRVYGGRVAAYNGGLKAVTTDRGTSAVAGDTLMIRTQGGTVESRVIQAVNGTQLVVSTPFKADPLPNAVFVIDAGQLRLQYFRVTNLTFNDEENTYSITGAEYNSSKYDAVDNNARLDTPPTSLIPTGLVNQPTNIQVSSFESVRQGQRITTLIASWDAPLDKNGKPQADVISYQVQWKRGDNEWINVPETGLRNIEVPGIFEGDYLVRVRAINSGGASSLWASSLLTHLKGRAGDVPKPVGLSASEDVVFGINVTWGFPEDTGDTLSTELQYSLAGDGSNPMLLAAVPYPQKLYQQMGLKAGQEFWYRARLVDRTGNQSAYTDWVRGQSSSDVTDITEAVLAQIKDTQLFKDLIENAVESSAKVAELAEAVRENAAGLAAAAGSNKQMAEAIIGNALAIADVVVRQSAQQGANSAKFEQLREVSRSKLPPATTVLAGGYFQLNNSSINSSNESATVTSSFSSIRKMKTSPKEFPSFSDNRKQFPPSS

SEQ ID NO: 1736 - protein, 1111 aa, Kosakonia cowanii
MIALGEGEFSGQLTGRDIYLDGTAIENADGTQNFSGVTWEFRAGTQAQKYIQGIPGTENEINVGTEVSSSIAWTRTFTNTQLSAVRLRLKWPSLFKQEDDGDLVGNSVKYAIDLQTDGGAWRTVLNTSVTGKTTSGYERSHRIDLPQAGSTWTIRLRKISADANSAKIGDTMLLQSFTEVIDAKLRYPNTALLYVEFDSSQFNGSIPQISCEPRGRVIRVPDTYDPETRIYSGTWTGAFKWAWTDNPAWIFYDLVVSDRFGLGHRLTAANIDKWTLYQVAQYCDQKVPDGKGGSGTEPRYTCNVYVQDRNEAYTVLRDFAAIFRGMTYWGGDQIVALADMPRDVDYSYTRANVVGGRFAYSSSTTKTRYTTALVSWSDPDNAYADAMEPVFEQALVARYGFNQLEMTAIGCTRQSEANRKGRWGILTNNKDRVVSFDVGLDGNIPQPGYIIAVADEMLSGKVMGGRISAVNGRVITLDRKPDAVAGGRLILNLPSGASQSRTIQAVNGRSVTVTTAYSETPQTEAVWVVESGELYAQQYRVVSVSDNGDGTFSISGAWHDPDKYARIDTGAVIDQRPVSVIPPGNQTPPANIVISSFSVVQQNISVETMRVSWDQALNAIAYEAQWRRNDGNWVNVPRSSTTSFDVPGIYAGRYLVRVRAINAAEISSGWGYSEEKTLTGKVGNPPKPVGFIASENVVFGIELNWGFPANTDDTLKTEIQYSLTGSDDDAMLLADVPYPLRRYQQMGLKAGQIFWYRAQLVDRTGNESGYTDWVRGQSSIDVSDITDAVLGQIKDTELFKDLIENAVDGSEKIAGMADDIKQNADQLELQAQAIKESSDGLAQAEVKIDELSVSMDGMTGGVKNSSIAIIQNSLAQVTSRRSQTASNAGNSASIDRIDTTIADTSQAVARALVTLDASAGGNVSSATDLTETLASFTQASATKINSLTVTVNGQQASIIQNAQVSADINNNLNAMYSIKVGVDAAGRQYAAGMGLGVQNTPSGMQSQVIFLADRFAVMSQAGGTVSLPFVIQNGQTFIRDTFIQDGSIENAKIGNYIQSNNYVAGSAGWKLDKGGTFEINGVAGGGRMLISSTLIRIYDSNNVLRVRMGLW

SEQ ID NO: 1737 - protein, 251 aa, Kosakonia cowanii
MSLNSDYQKLEPGDEVRLFEVDGTAFGTGEVLRFHSYSLAYTEAEIAAAGGNEKKLPAKSIWWQGEEYKAWPCRIEGIEASTSGSSAQPKLSVANLDSSITALCLAYDDMLQAKVTIHDTLGKYLDAKNFAGGNPSADPTQEKLKVFYIDAKSSETNEMVEFTLASPMDLQGLLIPTRQLHSLCTWCIRNKYRTGDGCDYAGTRYFDKNNNPVSDPSLDECNGTLTACKLRFGENNELSFGGFPGTSLIRS

SEQ ID NO: 1738 - protein, 252 aa, Kosakonia cowanii
MNLESLPKFYSPKSPKLNDQTPATGGVALTITDVMAAQGMVQSKASLGFNLFLAKMGIQDPAPAIDGLMQYALALKNPVLGKLSEKARGEVLQVLVQFAYADYSRSAASKSTCPHCEGKGVVREMQDVVKHPGVNGVEATVKHEAVEVICQHCAGKGEMATACRGCKGKGTVLDEKRTKLHGTPVRKVCGRCNGNRFSRLPTTLARARIEKIIPDLTSYQWYSGYGDVIALLVTKCWQEEAFAEGQLRKVTR

SEQ ID NO: 1739 - protein, 375 aa, Kosakonia cowanii
MAARPRKNNISVPNLYPLYSRKVNKVYWRYKHPITGKFHALGTDEAEAIAIATEANTRLAEQRSRQIMAISDKIATSKGKAITTNTWLDRYWDIQGERLDSGDIKLNTYKQKAKPVALLRERVGMKLISAVNVRDIAEILEAYISDGQPRMAQVIRSVLIDVFKEAQHYGEVPPGYNPALATKQPRRRITRQRLNLEEWQKIFDIADANHKYMGNAMLLALVTGQRLGDISNMKFSDIWDDHLHILQEKTGSKIAIPLALRLNAINWSLREVVARCRDYALSPYLVHFFRATSQAERGAQVKSNTLTMNFSKARDKAKIDWGDGTPATFHEQRSLAERLYETQGVDTQKLLGHKSPNQTARYHDDRGKGWTKIEL

SEQ ID NO: 1740 - protein, 119 aa, Kosakonia cowanii
MKRMPDKDAGFWASLIAWLYSHKTEWGYAGVAGMFSLLRSAYAQSSWSKRVLDAVSCSALAFFAAPTLQVVGGVLNWNVPDTAAQVFAVYIGYVGNDYISEKLRGWISRKTGDNSENQS

SEQ ID NO: 1741 - protein, 536 aa, Kosakonia cowanii
MPQSDWGELQQRFLSKHATTGVSPKEWCETQGLNYATARRYIKKPSAQSAQKSAQKKMRAAQEDKSANELMDDDGLTAQQRLFVAEYLKDNNATAAAARAGYSDPNYGRQLIANPNVAQAIAQQQKASILRTLGSADEVLAQMWQLATFDANELSQYRRGACRYCHGFGHNYQWRDMVEFEEHRLKAIEKKGKDPVDVGGYGYDHNREPNPACPRCNGDGIGQPYFADTRKLPPVSRLAYSGIKLGKNGVEITAISRERMYEAVMKRLGLADSEFAQQLQQIEIERRQLEVEKLRKELAADPEDEVPMPVAININVADARVRKDDDGDNEFSEVIGVDVADATLEGYVKYGLKALTAAIGANTDMVVTADIETDGKKTLTRGLRKYGDKFNRVVLFVMHSATYFDIVDEAIASKIYEEAGVVVYGGQPGTLGKPVLVTDTMDAAAILGLVAGAVTVTESQAPGFRSYDINDQENLAVGYRAEGTVNVELLGYSWDTAKGENPDLTAIGTAANWKKHFTSNKSTAGVLIKLGAASGE

SEQ ID NO: 1742 - protein, 401 aa, Kosakonia cowanii
MKDARVSLMYFEARHVSKTIQKERSKVLDMGNLVHALALQPETLAAEFSIEPEIPEGALTTTATIRECIDEYNASLPPQLSADDIKALLEAHNATLPALLPLGAAVDETAESYMALPEEFQRIESDKKQTAAAMKACIKEYNATLPAPVKTSGSRDALLEQLAIVNPDLVAQEAQKPAPLKVGGTKVDLIQALKAVRPDTVFADELLDAWRENPEGKVLVTRQQLETALAIQKALHAHPTAGKLLQHPDRAVETSYFGIDEETGLEIRVRPDLELDVDGVRIGADLKTISMWNIKQSGLRAKLHREIIDRDYHLSAGMYMETASLDQFFWIFVNKDEGYHWIAIVEASQELVELGILEYRATMRAIANAFDTGEWPAPITTDYTDELTEYDLRRLEALRAA

SEQ ID NO: 1743 - protein, 198 aa, Kosakonia cowanii
MAQLQLIKHSSNILIPATPETSDFLQSKCKLGAVLVADFKQVRNPAFHRRFFALLNLGFEYWEPTGGAISSNERRLVTGYAKFLASYGGSGEALLDAAEQYLSRIADRRSGSISVCKSFDAYRDWVIVEAGHYDAIQLPDGTLRKHPRSIAFANMDETEFQQLYKAALDVLWRWILSRAFRDQREAENAAAQLLSFGG

SEQ ID NO: 1744 - protein, 89 aa, Kosakonia cowanii
MAKLLNLQEWAAEVYSSPPSLSTLRRWVREGKIYPAPELHGKEYKLRPDAIYVDPSKKNLRLKPQHLKIPSKGTLLERLQNAEASPLRR

SEQ ID NO: 1745 - protein, 200 aa, Kosakonia cowanii
MNEIMTQIELSGVLGKIFGKKHQRIISTPLEAGKALAATIKGFEQYMISSKSRGLTYAIFKDKKNIGIDDLGYPVTGEVIRIVPVIIGSKKAGLLQTILGVVIVAAAVISGPVGLAALSGAQAFSIGAIGASMALGGVIQMLSPQPTGLASKQSADNRASYAFGGVTNTAAQGYPVPLLYGRRRIGGAIISAGIYVEDQQ

SEQ ID NO: 1746 - protein, 181 aa, Kosakonia cowanii
MRMNAKELIADARVTAPTLPPAAAKLMTAMADRLDLQFAALCESRNEAKQLAGENALMKSAIKTHSESVHFCVGCGKDDPCSNDDICYALEETPATDAFLATLRAEARKQGAVFAANRMLAAWDAGFVEDTPENAADIARAILMSTEFMDEAPDGDFDRSFADEMLEAIASQLRSKSEVPS

SEQ ID NO: 1747 - protein, 330 aa, Kosakonia cowanii
MIYTTGSIAVSGNTLTGNGTNFTQAGSLIRNGCTVLALTSPAQAFQITAINGATSLTVTPAASPAVPAGTSFAILLSDSLSVDGLAQDIAETFTMYQRYMGGFADVMNGAGDVTITINGTPVTVPGQKSLAKKGANSDITSLSGLTTALSIAQGGTGAKDAAGARAAFDLDNLYLRGDRNLSDVKSKKTGRDNLGVNASPNMWYVWQNPNVTSRLTFPSCNSAEGEIRVRIAKDGIRVKGILRYPAGTMTNGKTIITCQPIDIDGNTRTGLNSTFATGYVQYSNGTMGTAILQAVDNSGGIPVVIASTDGLNINWIILDIHFAFTSTSGA

SEQ ID NO: 1748 - protein, 236 aa, Kosakonia cowanii
MWDKTISAILAHAAQAFPAECCGVVIQKGRVEKYVACRNLAASPEEQFELSPEDYAAAEEQGTVVAVVHSHPGDGATTQPSEIDMLMCDATEVPWVIASWPEGDIRTIMPRGDRPLTGRQFVLGHADCWSLIRDYFRTEHGISLPDYSVERHWWEEGENLYMDNWHACGFREFDGPPQPGDMVIMQVQASVPNHAGVLLEGNMLLHHLYGQLSQRIPYGGYYRDRTIKVLRYKDLM

SEQ ID NO: 1749 - protein, 112 aa, Kosakonia cowanii
MVVETFSWCPKVAAQADTSFRIRKAQFGDNYAQVAGDGINPVTPQWSVSFTGDEAYVQAIKAFLKRHAGWKSFIWKPPLEPAGLWRSESLQIATHGNDKYTLSTTFIQAYHP

SEQ ID NO: 1750 - protein, 1163 aa, Kosakonia cowanii
MATLRELIIKISADSSSFQSEITRASRMGSDYYRTMQAGGRQAAAAAKESERALSDLTNGFASAGKAAAAATAAFATGKLVQIADEWNSVNARLQQASASADDFATSQRQLMEISQRTGTAFSDNANLFARAAASMREYGYSSEEVLKITEAVSTGLKLSGASTAEAGSVINQFSQALAQGVLRGEEFNTVNESGDRVIRALAAGMGVARKDLKSMADQGKLTIDKVVPALMSQLGTLQGEFATMPQTVSGSLQKVTNSFMGWVGGVNAATGATDALSGGLDGVAQTLDSFTSSAVSGALSDVADNMSVITTVAGALVGVGLAKYLSGIVTSATSATGALISAAKSEVALAVAQDRAAQSAVAASRADVYRAQQALQRAKGADVQAAQQEKIAAAEAKVTAAQARLTTALAGGTSTEKVRARAALERAQASLAAAKNADVQAVAERRLAQAEAARDRNLANRVSTQSNLNSVTAVGSRLMSSALGIIGGIPGLVMLGAGAWYAAYQNQEQARRSAQEYGRTIDEISKKTRAMSLPEASDNSEKAKNALDEQNRLIDEQKSKIESLKEQIAGSQYLINNPGPTTKGGFMINHLTSLKTVTDDLSTATEQLSVEQERLSQMQEKAASIQQTLEGLQYRRVSLIRQEAANQNSAYQSLLMMNGQHQTFNQLLGLGNQLLMARQGMTLAPLRVPQAEASQKQTDALEKSRRELALSRLKGEAKERARLGYAADELGLTADPQFQTNRLEYINNGLEEWRNNEANKKQPKGPKTDEEKAGDAYKRMIKQQKEQIALQGQSTELARVKYQVVEGELSTLDKAQKAELMRNAALIDQVKLREQLRNYEANLSDSNASARAANDAQLIGYGQGTRFRERMQEQFNIRKEFEQKNTDLLRQRQAGDIDETFYQQGLALNKRYLEERLRDQEGYYTASDAQRGDWLTGMSEGYANWVDEATDYSAMAADGMKEAMGGAVTTITDMLNGNLDSWKDWGMNVLKIIETVLVNMMVANAASSLGSLFSFGASSAATASSGTAIQSAASNFTFNAKGNVYDSPSLSAYSGGVYQTPQLFAFAKGAGVFGEAGPEAIMPLTRAADGSLGVRAVGAPQFSGGGPSVSFGDININGGAQSTAGQGTAATAGRQLKDAIVTVINEQASMPGSPLWRLLKGA

SEQ ID NO: 1751 - protein, 1264 aa, Kosakonia cowanii
MPPAGGFFYGRDMTNTAIKGRKGGGTKTRTPVEAPDSIQSIARAKILVALGEGEFAGGLDGRSIFLGDASSYTPLQNADGSYNFNNVKYEFRSGTQDQTYIQGFPGVENELQVAYELKAAVPYVRSVSNTQLSALRIRLGWPSLLTQKDNGDKVGTRVEYAIDLSVDGGAYVTVIDGAVDDKTTTLYERSHRIDLPKATTGWQLRVRRITPDSTTVNVVDSMRVEAVTEIIDAKLRYPNTALLYIEFDAKQFPNGIPQVVCNPKGRIIRVPDTYDPDARTYSGTWEGGFKWTWTDNPAWIYYDIVLNERFGLGQRIDATQIDKWELYRIAQYCDQPVPDGKGGSGMEPRFRCNVYIQERNDAWTVLRDLAGIFRGMTYWGDNKLYVLADMPRDIWHIYNHASVVEGKFTFADPSETTRNTAALVNWSDPANHYKDTPEVVYDNDLAMRFDYSQLEMTAIGCTRQSEANRRGRWALLTNGIGEVVAFSTGMDVPPVGEVIGVAANELAGRVIGGRVSAVSGRNITLDRAADVKAGNRLFLNLPSGVAQARTVQAVNGNAVTVTTAYSETPEAECCWGVDTDALFIALFRVTGTRDNDDGTFEVTGATYSPDIYAAVDTGARLDERPVSVIPPGVQAPPENIVIDSYSTISQNIAITTMRVAWDSVKGAIAYEAEWRRDSGNWVSVPRTSSQGFEVPGIYAGRYLVRVRAVNASDVSSIWATSAEVTLTGKVGNPPKPVGFTASETVVFGIELNWGFPANTDDTLKTEIQYSLTGTDDDAMLLADVPYPLRKYQQMGLKAGQVFWYRAQLVDRTGNESGYTNWVRGQSSSDVTDITEAVLAQIKDTDLFKDLIENAVESSQAVADLAEAVKQNADGLAAAAGANRQTAEAIIGNALAIADVVVRQSAQHGANSARFEQLREVIATETEARVTDVIRLEAKTDQNAAGITEVRQALSNESEARASAVDELTAKTEKNAANVTVLNQTVTDLDSSTASRFEEISAEIAGIDGSEIRGGIQSNSIALITNTLAQVNTRTLLSVQYGDNKAGIQRVDNVMADASQAVAESLRTLDASAGGTANATDFAKTMANFSQVSATKINSLSVTVNGQQAAIVQNSQAVADISGNLSAMYSIKVGVDAAGRQYAAGMGIGVQNTPAGMQSQVIFLADRFAVMSQAGGTVSLPFLVQNGQTFINEAFINYASITLGKVGSWYSANYVAGQTGTIMKADGTFEVNGAVSGQGRMQITNNRIISFDAQNRPAAVMGQRL

SEQ ID NO: 1752 - protein, 252 aa, Kosakonia cowanii
MSISSDVQKLEPGSRVRLIEVDGEAFGAGILRFHNETIPHTEAEIIAAGGDASKLPPKSVWWQGLEYGAWPFELTGLSVSSDGQSARPTLTVANISGTIGALCRRFQGMAKAKVIIHETFAHYLDSRNFSGGNPAANPNEERKQVYYIDRKSSSDDETVEFELSSPADLRGQLIPTRQIQPMCTWCMRGWYKTGNGCTYAGQNGFFDKDGNPVDDPSQDVCSGLLSTGCKPRFGADNELDYGGFPGASLLRG

SEQ ID NO: 1753 - protein, 199 aa, Kosakonia cowanii
MEKRTVIKLSGSMAQRFGRTHRRVLSSASEVFRALSSTVDGFEDYLREARARGLDFVIFRDRRNISQEEFSLLGPGDELRIIPVIRGSKRAGIFQAVLGVALIAGGIALGPAGSGLIGKGVALNVALVGASMALGGVVQLLSPQVAGMRMRQDPDNKPSYAFGGPVNTTASGNPVPLLYGQREVGGAIISAGIYAEDQQ

SEQ ID NO: 1754 - protein, 252 aa, Kosakonia cowanii
MNLESLPKFYSPKSPKLNDQTPATGGVALTITDVMAAQGMVQSKASLGFNLFLAKMGIQDPAPAIDGLMQYAQALKNPVLGKLSEKARGEVLPVLVQFAYADYSRSAASRSTCPCCEGKGMVREMQDVVKHPGVNGVEATVKHEAVEVMCQHCAGKGEVGTACRGCKGKGTVLDEKRTKLHGTPVRKVCGRCNGNRFSRLPTTLARARIEKIIPDLTSYQWYSGYGDVIALLVTKCWQEEAFAEAQLRKVTR

SEQ ID NO: 1755 - protein, 84 aa, Kosakonia cowanii
MKMINAAAVMLVSLMASGCASNTPPLCYNGAVVMKSRVAVPVFGIRKPVSTTEYLSGGSFGYQWVERSAFTDTASCDRLPLTEE

SEQ ID NO: 1756 - protein, 317 aa, Kosakonia cowanii
MQMFIAGTRFEAINVMAASYVLDVITITGTGSKTYSLPGVELTYAIVNDFMGGQLTGATYSVSVSGLTISWNVNNAVTLIVYGSPVAGTLSDYFGYQLFQYLNGVRTVKLAPNYVPLCLREIIDVPAGARTVQTQVPAGNPVMCFHRHTGAEMDICWWKPATANGYHALQFPTDGSNQTGCRVYVFSNILANIPDYGFYLYRDGQMVWHSNCLPLQVIPLTNGDIISDTPLAVSSSVTAHIFVPQDPAYPTGYSNFMCASAGNDGTRYKVQVGKVFQSTFISSPDEGRRMRGWACGGVGYIETQFYDQYYRYALGLV

SEQ ID NO: 1757 - protein, 55 aa, Kosakonia cowanii
MSESLNNKELAAVGHEFAKALSSDTPNIDIAKIVSRLAERVVCTNSIVTNMFSSM

SEQ ID NO: 1758 - protein, 471 aa, Kosakonia cowanii
MIYTTGSIAVSGNTLTGTGTNFTAAGSLIRTGCTVLALTSPAQAFQITAINGATSLTVTPAASPAVPAGTKFAILLSDSLSVDGLAQDIAETLTMYQRYMGGFADVMNGAGDVTITINGTPVTVPGQKALAKKGANSDITSLSGMTTALSIEQGGTGAKNKADARLALSAASSGANSDITSLSGLSTALSIAQGGTGATSVSGARAALGIGAAASLGDALAAGAVLKREPGNANTTLNNPTAIFNWLKSVGFGSYQFTAAQAGAIIRYYPTLYFNAGNLHALLQSNYSTGELISWGAVDNGGSWSFAQNILYGTANTTKGSDGTIKAASPVARIVQSQEACQRADVDDDGFMWCGCGTANREAEGITISRLDTGVYTLTGSAGLASSGWQLLPPRDPQGSGDMGIVEAEQTESGGLTIRLYRRRYLLTEDGEIEVQKGTAIDVPPTSWIDVRLDMPETSIWNQRNAGSQEQ

SEQ ID NO: 1759 - protein, 243 aa, Kosakonia cowanii
MNKTIMSAIRAHALEESPRECCGLVIQSGRRQRYIPVSNTHENPTEHFRIDGEFWANAEDIGTIIRVIHSHPGDGARPIPSDLDRQQCNNSGVVWGIYAPDSDEYAEIMPEAVPLIGRPFILGSHDCWGLIMDWHATQGVTLDDFRVDYPWWESQYPDNFYFDNWEQEGFIECDPAPGCMVIMQVESDKWNHAGIITEEGELLHHLYGQPSCITPYARGYFKDRTMICIRHRSLPEEIKPWRV

SEQ ID NO: 1760 - protein, 116 aa, Kosakonia cowanii
MAVETYKWPAQLGAGAIEYNQTIRASQFGDGYEQVAENGINSTAIQVPMIYVGKEALINEIRSFLLAHTVKAFIITPPGEEKGLYRVVKDSVRKNQISSNAAELTFTIKRAYGVYA

SEQ ID NO: 1761 - protein, 1238 aa, Kosakonia cowanii
MSDIATISLRVNTAELERGNKALDDFQQTAGSAANKADDLNSVFRAGADSQKKNTQSLKEQKEELQALLNKISPVNRAMDELETLQSKLAGFRGKGLLGNEDYSRFSAVLDTTRDKLFQVMEAETAEGQERLKLAQDTQRAAAAQDSFLKSLSEQAATFRASKSDVLEYRASILGLTQEAAPLIQQIRERELAIASEAVQTRIAAQELREKQAAERQALAEASRLQSQNDNFVESLRNQALAIGKSRAEVLELKAAQMGLLQEAGPYIAALKAQEAATAQEAANKKVSAMQSRMLRDAIAELEAAERAEASEMQRAQNIRDSFVRTLEQQAASIGKTRVELLEMKAAQLGVSQQAAPFIEKLREQDEAWKKGGISAGQYRQALRMLPAQFTDIATSIAGGMPLWMVLIQQGGQISDSFGGLGGLFQFIKEEVLGFKEATDDSSESLSENANSLAENAEHGRGMLSFLTPARLAVGGLVGVASLLAIAWYKGAQEASEFNKQLILTGNYAGKTAGQLSQLSRQIADDAGVTIGESSATLAKIVGSGRFDGNKLEVVARAAAAMEDAVGQSVDTTIANFQKLYDSPVKASIELNTQLHYLTAAEFQYISALERRGDKEEAGQKAADSYSRAEQQRSQQVIDNLGLIDQVIRGVSDTWKAYWDAALGIGRKESTAEQLEVVRQRIKEITNQSRPGVFGMGNVGDGGAAKRELAALLQQERELGFVIKSQEGFNQKRAEFNKINQDGIDAQISFNKYLDAGTTQAEKRALAQKDLNKAIADNAKAVKATQGLPYEQRVKPLTPEQISKARAGIEKLYKDPKIPKAKGITVAAGDRAEDSAQAELLALQAQLKTLQDHRSVNDKISQQRNDLYATESKFAVLEAAASIRQLSKQEKSLLASKNQVLQLAQQKALLGDQITTQEQLNKRMDTAQKYVTQIVEKQAGLASGATMSDRLAGRQANLSQLRSGWLNAGGGLNDDGYKRELKAANDYYAAEDKLRGDWMAGARKGWAEYLDAATNVYGSMQSVAQSALGGISDMLTNLVTTGTASFKSFAASMMKMIADVINRLLVAYTVQAAMGWISAGTSSAGSGAGQSFAVPSFRPAWNGGYIPEFDSGGYTGDGGKYQPKGVVHGGEFVFTKEATAAIGVNNLYAMMRGAQGYAEGGVVGRPPMLGLMSGSGNAAPVINTTVNVDASGNPSAQSSSSGDAMGRAMAAEIQNAATLVVQKHLKPGGMIYNFTKGR

SEQ ID NO: 1762 - protein, 1274 aa, Kosakonia cowanii
METITGAKGGSQKQHSPVEQPDSAQSMARCRILLALGEGEFAGGLDATRIFLDGTPLGNAEGTMNFENVTWDFRPGTQTQTPIPGFAAVENETSIGVSLTKVAPWTRALSNTQIDAVLVRIGIPGLQQQQNNGDIVGTTVKYHIDLAVDGGAFSTVMTRTVTEKLSSLYELTHRINLPKATTGWQIRVVRDTDDSTSQLLQNKTQVQAITEVIDARLRYPHTALLYVSFNAKSFSDIPKISCKPKGRIIRIPSNYDPIARTYSGTWDGTFKWGWSNNPAWIWFDVLTEPRFGLGRRITADMLDKWELYRIAQRCDQKVPDGKGGSGTEPRFMFDVYIQSQADAWQVIKDIAAGFNGMTFWGNNMFNVVSDMPADTSKLQILNRAAVIGKPVYSSGSEKTRFSSALINFSDPDNHYQDRTTAVMFPDLVKQFKFKQTQITAIGCTRESEAQRRGGWAVYSNSLDRIITLQTGLDGYVYVPGTVFAFADERLSGRVYGGRVAAYNGGLKAVTTDRGTSAVAGDTLMIRTQGGTVESRVIQAVNGTQLVVSTPFKADPLPNAVFVIDAGQLRLQYFRVTNLTFNDEENTYSITGAEYNSSKYDAVDNNARLDTPPISLIPTGLVNQPTNIQVSSFESVRQGQRITTLIGSWDAPLDKNGKPQADVISYQVQWKRGDNEWINVPETGLRNIEVPGIFEGDYLVRVRAINSGGASSLWASSQLTHLKGRVGAVPKPVGLSASEDVVFGINVTWGFPEDTGDTLSTELQYSLAGDGSNPMLLAAVPYPQKLYQQMGLKAGQEFWYRARLVDRTGNQSAYTAWIHGQSSSDVTDITEAVLAQIKDTELFKDLIENAVDSSAKVAELAEAVRQNADGLAEAAGANRQTAEAIIGNALAIADVVVRQSAQQGANSARFEHLREVIATETEARVTDVIRLEAKTDQNTSGITEMRQALANETEARATAVDQLTAQTEENKASVTELTQTVTDLDSSTASRFEEISAEIAGIDGSDIRGGIQSNSIALITNTLAQVSQSTRMSVQYGANAAGIQRVDNVMADASQAVAESLRTLDASAGGGTANVTDFAKTMADFSQVSATRINTLSVTVNGQQAAIVQNAQVSADINNNLSAMYTIKVGVDANGRQYAAGMGIGVQNTPAGMQSQVLFLADRFAVMSQAGGTVSLPFVIQNGQTFINDGFFRDASIQFGKITDSLKSDNYAAGAAGWNLPKSGNAEFNQVTVRGAIYATNGNFNLTGPGNATVINGLGVTVNLANGGLIRLGSW

SEQ ID NO: 1763 - protein, 199 aa, Kosakonia cowanii
MARLTTIRLYGALGARFGRVHKLAVQTSAEAVKALCINFDGLEDYLMNAKKNGMTFAVFRGKRNIGVQDFQGLAGKSDIRIAPVMEGAKKAGMFQTILGAVMVVAGIIVGVATGWTGVGLTFGAGLIMSGASMMAGGIYQMLSPQPKGLQGRDDPDNKPSYAFGGSVNTLAMGNPVAPLWGEREIGGAIISAGIVAEDI

SEQ ID NO: 1764 - protein, 267 aa, Kosakonia cowanii
MKLESSLKHFSPQGMNISDSVKGTSPDRLTGTDVMAAIGTTSSRARFGLAAFFGKAGISKTDEQIAVQALVRHAMEVAPKNVRKAAGSEFGWCMHVLAQFAFAEYARSAASSSTCTSCSGGGFISSREDVIKHPGIFDADGVELVAPKIKHELVKHACTACGGKGIIPARCRCGGKGEVLDRVATKERGAPVFKTCERCSGNGFSSLPSTAAHKAIIRRLPDLHIRTWTRNWKPFLESLAEICQQEEAKAEKEFQCATSFHDEENKI

SEQ ID NO: 1765 - protein, 360 aa, Kosakonia cowanii
MQRPARYDANLPRNLTFRKRDKLYSWRNPITGQVIYLGRIDRREAIAQAIEANSYLDQNYIPSSLLQRIKETPTLTMAKWLERYDVILERRELKPNTMKVRRNQMETIRKEFGTIALSAVTTKDIAEFLETYIACDKKSMAAGLRSVLLDVFREALVEGHIERNPAEPTRTPAPKVKRERLLLEAYFTIRETAAANSVWAANAFDLALVTAQRREDIAMMKFTDIREDRMFVIQEKTGNKLAIPLDLKLEAADLHLKEVIERCRVNNPSEFLLYSPVRRGGRKPGPLTPDGLTQAFSDTRDVTVLKFGPHPPSFHEIRSLASRLYEKEKGEEFAQRLLGHKNLSMTKKYLDSRGAEYVRV

SEQ ID NO: 1766 - protein, 204 aa, Kosakonia cowanii
MPKEMNINAVRGPSDHSVRDQVVEAATEHFGHFGYEKTTVSDLAKAIGFSKAYIYKFFDSKQAIGEVICANRLAMMMDIVNAAIADAPSASEQLRRLFNAVVQAGSDLFFHDRKLYDIAAVAARDKWPSAQAHEQRLRQLIEQIVKAGREAGEFERKTPLDEAADAIYLVMRPYISPVQLQYNLETAPAAAVFLSSLILRSLAP

SEQ ID NO: 1767 - protein, 369 aa, Kosakonia cowanii
MFRLKPATFAVYLLPFALVACGDASDNSDPRSLPPLVRSAAAINANHSSRAFTGVVVARIQSDLGFRVQGKILERLVDTGQAVKRGQPLMRLDPVDLSLQAQAQQQAVAAAKARARQTADDESRYRGLVTTGAVSASAYDQIKAAADTARADLSAAQAQANVAQNAMSYAVLVADDDGVVMDTLAEPGQVVSAGQPVIRLARAGQREAVVQLPETLRPSPGSTAQASLYGSDKQPVSATLRLLSDAADPLTRTFEARYVLNGPLSGAPLGSTVTIHIAQGRASQPLLQVPLAAVFDAGKGPGVWSISGNPARVAWRPVQVVSLGDDAASVTGSLKPGEQVVALGAHLLHDGETVRLAKQSDVSVAGSQP

SEQ ID NO: 1768 - protein, 369 aa, Kosakonia cowanii
MLRPNPATLAICLLPLAIVACGDNGNSDDPRTQPPLVRTAPVMSAVDNARAFTGTVVARIQSDLGFRVPGKVLERLVDTGQTVTRGQPLMRLDPADLSLQAVSAAQAVSAAQARARQAASDEARYRSLVTTGAVSASAYDQVKAAAETARADLKAAQAQASVAQNAMHYAVLLADGDGVVMATLAEPGQVVSAGQAVVRLARSGQREAIVQLPETLRPSLGSRAQATLYGRAGQAVPATLRLLSDAADPLTRTFEARYVLQGALASAPLGATVTLNITEGLSAKPLLQVPLAAVYDAGKGPGVWEVSGKPARVSWQPVEVVNITDDAARVMGNLQPGEPVVALGAHLLHEGEAVRQAKQSDSEIAGSRP

SEQ ID NO: 1769 - protein, 1036 aa, Kosakonia cowanii
MSSGRFNLSALAVRERSVTLFLILLITVAGILSFLGLGRAEDPPFTVKQMTIISAWPGATAQEMQDQVAEPLEKRLQELKWYDRTETYTRPGLAFTMLSLQDSTPPSEVQEEFYQARKKLSDEARNLPAGVIGPMVNDEFSDVTFALFALKAKGEPQRLLVRDAESLRQRLLHVPGVKKVNIIGEQAERIFVSFSHDRLATLGISPQDIFAALNNQNVLTPAGSIDTRGPQVFIRLDGAFDKLEKIRETPVVSQGRTLKLSDVATVERGYEDPATFMVRNQSEPALLLGIVMREGWNGLDLGKALDKEAASINADMPLGMTFTKVTDQSVNISSAVDEFMIKFFVALLVVMVVCFLSMGWRVGVVVAAAVPLTLAVVFVIMEASGKNFDRITLGSLILALGLLVDDAIIAIEMMVVKMEEGYDRIKASAYAWSHTAAPMLAGTLVTAVGFMPNGFAQSTAGEYTSNMFWIVGIALIASWVVAVVFTPYLGVKMLPDIKTVEGGHDAIYNTRRYNRFRQLLTRVIARKWLVAGAVVAVFTVAVLGMALVKKQFFPTSDRPEVLVEVQMPYGTSIEQTSAAVTKIEDWLRRQKEAKIVTAYIGQGSPRFYLAMAPELPDPSFAKIVVLTDSQEAREALKFRLRQAAADGLAPEARVRVTQLVFGPYSPYPVAFRVTGPDPTVLRDIADKVKTQMQASPLMRTVNTDWGSRVPTLHFTLNQDRLQAVGLTSNSVAQQLQFLLSGVPVTAVREDIRSVQVMGRAAGDIRLDPAKIADFTLVGSAGQRIPLSQAGEVEVRMEDPVLRRRDRMPTITVRGDIAESQQPPDVSTAIMKQLQPIITTLPDGYRIDEAGSIEESGKATKAMAPLFPIMIAMTLLIIILQVRSMSAMVMVFMTAPLGLVGVVPTLLLFNQPFGINALVGLIALSGILMRNTLILIGQIHHNEQEGLAPFHAVIEATVQRSRPVLLTAMAAILAFIPLTHSVFWETLAYTLIGGTLGGTIITLVFLPAMYAIWFRIKSPDSNSSTENRSASGGLKNV

SEQ ID NO: 1770 - protein, 1028 aa, Kosakonia cowanii
MSGGSFNLSAIAVRERAITLFLIILITIAGSVSFFKLGRAEDPPFTVKQMTIISAWPGATAQEMQDQVAEPLEKRLQELQWYDRTETYTRPGLAFTMLSLQDSTPPSLVQEEFYQARKKVGDEAKNLPAGVIGPLVNDEFSDVTFALFALKAKGEPQRLLVRDAESLRQRLLHVPGIKKVNIIGEQAERIFISFSHDRLATLGISAQDIFAALNDQNVLTPAGSIDTRGPQVFIRLDGAFDTLEKIRQTPLVAQGRTLKLADVATVERGYEDPATFLVRNQGEPALLLGVVMREGWNGLALGEALDKEAASINAGMPLGMSLTKVTDQSVNISSAVDEFMIKFFVALLVVMVVCFLSMGWRVGVVVAAAVPLTLAVVFVIMEATGKNFDRITLGSLILALGLLVDDAIIAIEMMVVKMEEGYDRIKASAYAWSHTAAPMLAGTLVTAIGFMPNGFAHSTAGEYTSNMFWIVGIALIASWVVAVVFTPYLGVKMLPAIKPIEGGHAAIYNTRRYNQFRGLLARVIAAKWLVAGSVVVLFTVAILGMGLVKKQFFPTSDRPEVLVEVQMPYATSIAQTSATTAKIEAWFRQQKEAEIVTSYIGQGSPRFYLAMAPELPDPSFAKIVVRTGSQQAREALKFRLRHAVADGLAPEARVRVTQLVFGPYSPYPVAFRVMGPDPQVLRDIADKVKTVMQASPMMRTVNTDWGARVPTLHFTLDQDRLQAVGLTSSAAARQLQFLLTGVPITSVRENIRAVEVIGRAAGDIRLDPGKIAGFTLVGSAGQRIPLSQVGEAEVRMEEPLLRRRDRVPTITVRGDIAESLQPPDVSTAMMQQLQPVIAALPDGYQIEQAGSIEESGKATKAMAPLFPIMIAMTLLIIILQVRSLSAMVMVFMTAPLGLVGVVPTLLLFHQPFGINALVGLIALSGILMRNTLILIGQIHHNEREGLAPFDAVIEATVQRARPVLLTALAAILAFIPLTHSVFWGTLAYTLIGGTLGGTIITLVFLPAMYAIWYRINRPDPHEAKRAVG

SEQ ID NO: 1771 - protein, 335 aa, Kosakonia cowanii
MAKPDWGALQQRFLSDHAATGISPKDWCEAQGLNYATARRHIKKPTAQIAQKTAQKQVRNAQKEKDVNALVENDGLTAQQRIFVAEYLKDRNATQAAIRAGYSAKTAEQIGYQLLHKTSVAAAIEKQQKASLMRTLASADEVLAQMWQLATFDANELSQYRRGACRYCHGFGHNYQWRDMVEFEEHRLKAIDKKGKDPVDVGGYGYDHNREPNPACPRCNGDGIGQPYFADTRKLPPVSRLAYSGIKLGKNGVEITAISRERMYEAVMKRLGLADSEFAQQLQQIEIERRQLEVEKLRKELAADPEDEVPMPVAININVADARVRKDDDGDIADP

SEQ ID NO: 1772 - protein, 162 aa, Kosakonia cowanii
MTRIGILGVNDLTDTILVELFRLDPCAHVYLSSVEHERANLLARKFPCWIQDDVQAVINEADIIIITTGTSSPENPSEKIEYRKSQLIFFLEAWTSINSQVFSPHTDKKINFTTRHVALANISPFIHLTEVQIDDYLFILKVLLVAMKPVHTLDVNFRSSSE

SEQ ID NO: 1773 - protein, 121 aa, Kosakonia cowanii
MNRKAFINDLISWINNNIESHLKIDDAAIKSGHSKWRLQRLFLAETGQTLDQFIREKKLVLIADKLISSNEPLINLAINYVFDSQQSFTKAFHKKYQLPPPKKYRKKFNRQHSNVFYFDGK

SEQ ID NO: 1774 - protein, 358 aa, Kosakonia cowanii
MQNTNVAVADQNAVVNSNIALFDSQYLNAISTFAQIMAQGAATVPKHLQGNQADCMAVAMQAAQWQMNPFAVAQKTHLINGVLGYEAQLVNAVISRSGVLANRFEYEWYGPWEKVVGKFHIRKGEKGEYRVPGWTMADEAGIGIIIRATLKGEDHPRELDLLLAQARTRNSTLWADDPRQQLAYLAVKRWARLFCPDVILGVYTPDELEDRQEKEINPAPQQRVSVADIPAESTTNSAQESGTNIDGMADEFRDRIEVAQSVDQAKAVRVDIEAAKTTLGSALFTELKNKAVRRYYLVDARNKVEAAINSLPQPDEPDAAEQFTKAEQALAAAKRHLGDELYDQFAVTLLDMKPEYVA

SEQ ID NO: 1775 - protein, 212 aa, Kosakonia cowanii
MAKQGVGLSMAKKPRRKCANLSCRQWFNPVREGQVVCSFECASAIGKELTAKAREAAKQKELQRQRTEEKAGRQRRAARRKELKPIRHWVQMTQRAFNDWRREMLLAAGHGCISCGTKTAFAWHAGHYRTTAAAPQLRFNPDNIWLQCSACNVHKSGNIEAYRVALVELIGEERVLALESNNETHRYTREELDGIRAKARADLRVLKQQEAA

SEQ ID NO: 1776 - protein, 1131 aa, Kosakonia cowanii
MEFFYVVKATQKSGKQDAVIWFTAKSEARAALTLDVELEEAGIETGRGKDYVKPIRTDMPIVGDLPEEGVVDFTWCDRYQLADDQRTWNVIHGAAPQDETHLAQASTINDADLPAALVTATDTVDAGNTSQLENRTPSVRLAVHLLGDKYHSEISQEQQIVANELAMDEANVYFQNLLQAKNEVPDMSELSLHAEWKLVQAVKDVFPQDKEHEPALLAAFMSSWVKAEVGERAQLVEDWLGGKLPAPEVADASEPGDDAPVSNAEDQQDATPEEVAQAHVQAFRDRDITELHAVPTLSFRHRLLAQFITEKEYAYHIDNEQLNTVRQLEMDTDNSYVQNLLLAAENVEGMKNLRDFEFWRLTDAVKRVFPSDKATPDLSLMLQFMKAWKTTDYIDRGLLAKEWINGNRVSTIQRTDTGTNAGGGIKTDRNADYEHTLDTLDIEIACATLPMDFDIYNIPGSIHRRAKDIVAAKESPWKEWSAALRKTAGILDYSRAAIFALIREASSGMTQFPDRMTGYISATLNEYKHDTPEARILAAARQIDSAAVVAGVIQGTEPSHQLVTTAQPEVANLGGGIFSIDGLLDEKANPVINTPSNEVEKQEVEIVGSVQMEETDPSKAEACNALPAVEVVDEAAAQTVSVSPADILAAATPELTSNVAADLDQNIDALSQYEPELSPTEPEKTEIGPVADISEPEATAKEWPAYFEPGRYEGLPNDVYHAANGISSTQVKDASVSLMYFEARHVSKTIQKERSKVLDMGNLVHALALQPETLAAEFSIEPEIPEGALTTTATIRECIDEYNATLPPQLSADDIKALLEAHNATLPAPLPLGAAVDETAESYMALPEEFQRIESDKKQTAAAMKACIKEYNATLPAPVKTSGSREALLEQLAIINPDLVAQEAQKPQPLKVSGTKADLIQAVKAVKPDAVFADELLDAWRENPEGKVLVTRQQLETALAIQKALHAHPTAGKLLQHPDRAVETSYFGIDEETGLEIRVRPDLELDVDGVRIGADLKTISMWNIKQSGLRAKLHREIIDRDYHLSAGMYMETASLDQFFWIFVNKDEGYHWIAIVEASQELVELGILEYRATMRAIANAFDTGEWPAPITTDYTDELTEYDLRRLEALRAA

SEQ ID NO: 1777 - protein, 227 aa, Kosakonia cowanii
MGFALPNGATVFVGSKLATPVAVTGVSNAAGAVFTVANGHGHGLAVGDVVLVSSGWALIDSLVARVTAQTTTSVTIGVINSTDTNFFPAGSGTGSLSKVAEWTEIPQITEVSQSGGDQQYTQIQFLADDRQRNLATYKAAKSQTFTVAHDSTLPIYAVLSAADRSGDTLPLRMYVPKAKETRYWSGKPSFDPQPTTAPNAVETVQPAFAIQSRDITFYKDAAPQAAA

SEQ ID NO: 1778 - protein, 202 aa, Kosakonia cowanii
MADNRAFMVSINAFVSQAKERQEEVVRVVGIKILARLVQMSPVGNPELWAVNQTAAAYNSAVAEHNLRQVADPANLTKTGRLRKAARVSDSMDIKAPPGYTGGRFRGNWQVSFDSRTTDETGRVDKAGHLTMAAGNVTLGLFKVGVRDIYFCNNVPYSYRLEMGHSSQAPGGMVRITAAEFQRYFNQAVSEVKNDTGHHNGA

SEQ ID NO: 1779 - protein, 160 aa, Kosakonia cowanii
MIITDITSPAMNSYAGEGDLKAFADLRDITLPEKIAPLLIRAMDYLEGLDWAGWRSEPKQPLAWPRAGIELDGYELPAGEVPHQVVTAQCMLAVEAMDGDLLGSVREAAVKSERVEGAVTTTYAVADGEVFRPSYPAVMALLGELAGGRGYAVNAFAERA

SEQ ID NO: 1780 - protein, 229 aa, Kosakonia cowanii
MNHELFHAVQSRDGEMLARMAGGSREQAKVINSDAERMVDLLFSQLKQVFPASTQTNLRSEADERTAKQQWIATFAENGIRSREQLVAGMQKARSSVSPFWPSPGQFVAWCREGKGLLGISPADVMIEFWKWRKLVYKYPTSEQYPWTQPLLYHICLELRRRGVDRQMNEKELLSEAGNLLALWEKRVAEGKPIPPVRRALAAPHQDRGPTPAEMLMAEYKRRQAQGRD

SEQ ID NO: 1781 - protein, 103 aa, Kosakonia cowanii
MATKFQLQPKPTFKADVIIPRAGEDDGVLTFTFRHKPVKELAALEEIEGKTAIDFLTEITESWALPDEFSHENLEMLLDNYPGAMKAIVGTYYRELTGNREKN

SEQ ID NO: 1782 - protein, 136 aa, Kosakonia cowanii
MIPDIITALESMLGLWADGEGVRVAWDNIQFDPPGDGLYLISHDMPAQPYSIDMAGGCRVYPGVYQVTVVAPAGGGKSQARVLAHRVAGLFPENQEIPGDGFIAWVTSPPAIYPGIADGVSYSIPVSINYRADISA

SEQ ID NO: 1783 - protein, 116 aa, Kosakonia cowanii
MPVNYTRMKATSTRLLTENGAAYPVKRKGTVTVIGGVEHREPDKTFTAISVRTEYRPGEIDGTVIINGDMRIMFTADTELRTGDMVDVDGKWYRIEKPNPVNPGKLLLCYRAQLRA

SEQ ID NO: 1784 - protein, 256 aa, Kosakonia cowanii
MLIRNMLLKYYAPEDDGQGGGGGDTEITPEIQKLIDDQVAAQVSGLKTKNSELLGTIKQQKDNLSRFDGIDPDAVRGILQRFSDDEEAKLIAAGKIDEVLDKRTERLRADVDKQIKAANERADKAEAFSGKFRDRVLGDAIRSAASKAGALAEASDDLILRAKGTFQLNDEGEAVAVDANGDVLFGKDGKTPLSPLEWAESLKETAPHLFPRAEGTGAGGHKPGGGGSQKRSEMSASDKADYIRKHGQQAFLKLPK

SEQ ID NO: 1785 - protein, 468 aa, Kosakonia cowanii
MANNDITWVRPEHRAASAAWKKIRDFCKGAEAVKEPGNNYLPLLDSTDKSMRNRKRNEDYLQRAVFYAITGNTKIGLLGLAFRKDPTFSAPEKLSYLLKNADGAGTSIYQQSQLVTENVLEVARDGLYVDYAEGSGQAIILRYLAENIINWRTKRINGRDQLVLVVLRECVEQEDGYAFKDEVQYRELALEEGRFICRVWRRSADAGSAVYAVTSEYQPKPKGKDSWDEIPFTFVGAQNNDPTIDDSPLAALVEINHGHFRNSADYEDSVWFCGQVQPYMTGLDEGWRDHLEKKGVKIGSRSPLLLPREGNFGYAQAQPNMLAKEAMDSKRDYMVQLGARLIEQNAAVKTATQSSSEQTSSTSVLGICVSNVSEAYSLAIGWCAKYLGVGEQQAAYAINQEFIAKVAESGMVTAIVNAWQSGAIRDTDMIRALQKLDLINPADSPDDIIDELHNPTPTLIGGNNGNGK

SEQ ID NO: 1786 - protein, 436 aa, Kosakonia cowanii
MTGISPTLNVPQAQFLAMPHKFKAYVAGFGSGKTWVGCGGICKGMWEHPKINQGYFAPTYPQIRDIFYPTVEEVAFDWGLKVQINESNKEVHFYAGRQYRGTTICRSMEKPATIVGFKIGNALVDELDVMPALKAQQAWRKIIARMRYKVAGLRNGIDVTTTPEGYKFVYQQFVKAVRDKPELATLYGLVQASTFDNEANLPDDYIPSLLASYPPELIKAYLRGHFTNLTSGTIYHQFDRRLNNCADEEQPGEPLFIGMDFNVGKMAAIVHVKREGLPRAVRELVKVYDTPAMIKRIQEEFWRYEGGRYVASRQIYIYPDASGDSRKSNCASLTDIAQLREAGFSVIVNASNPPVKDRINSMNAMFCNALGERRYLVNVQRCPVYTESLEQQVWDKNGEPDKKADNDHPNDGGGYFIVKDYPIVKPAYSITMDTTF

SEQ ID NO: 1787 - protein, 310 aa, Kosakonia cowanii
MENQKTGFIPLYRSVLKQPWGKDVYLRTLWDNLLLTAARQPYTANFKGRQWPLQTGQLVTTTADLGLALCDRNGEPTSRHAVDRMLAFFEREGMITTAGERRKGTVITITNYALYAQKMDDLPAHNAAHNSEHYPAHNESSNGAASEGSAAHNPEHKGALKPAHHEQEVILNTNVFNDRQKKSKSLPDAAVQTPAGDKWGTAEDLQCAEWMLALRNITKPSMKKPNLTTWANDIRMMRQLDGRTHREICQLFKWAAQDSFWHKNILSPAKLRKQWYTLELHREDSSRKPINDAPASDAHWNSPEAWKDFI

SEQ ID NO: 1788 - protein, 198 aa, Kosakonia cowanii
MAQLQLIKQSANILIPATPETSDFLQSKCKLGAVLVADFKQVRNPAFHRRFFALLNLGFEYWEPTGGAISSNERRLVTGYAKYLASFGGSETALLDAAEQYLDRIADKRTGSISACKSFDAYRAWVTIESGHYDAIQLPDGTLRKHPRSIAFANMDESKFQQLYKAALDVLWRWLLSRSFRDQREAENAAAQLMSFGG

SEQ ID NO: 1789 - protein, 361 aa, Kosakonia cowanii
MATVNEMLRDEAIAHTVWISRYSTGVANRMVKLLNDSDAELTARLLLAMDSLPTSQFTVSRLESMLGSVRELNQQAIAGMQTSLEDELLQLAGHEAGYQLSLFDSLLPQRVKERYPLQSITPEQLYAAAMAQPFQGRLLSEWADNLEADRMARVVNAMRRGYLQGDTTETIARQVRGIASKGYKDGALQLSRTNAASITKTAVNHLAATARTNFAEANGDVLKGKQWLSTLDNKTTPTCIIRDRLRYTLDNKPVGHKVPYLQGPGKIHFCCRSTETLITKSWRELGIDSNELDEDTRASMDGQVPADTTYLDWLARQSLPRQDEILGPERAALYRAGELKLGEMFTDKGEWISLARLKALS

SEQ ID NO: 1790 - protein, 66 aa, Kosakonia cowanii
MKETWFYHMECTTEQAEELLAQYRRRGVKVERSLNPDLITWTVSAQLPEGNHPPRPSRVWQSKVWG

SEQ ID NO: 1791 - protein, 107 aa, Kosakonia cowanii
MCNRLKPKQKTIVEFIKKNGPATPRQIRKLLDCDIREAYDRLKRLGMAGIVKNIGKPKHPEYQLVQRWQEKIKQPKPRIPAAPSATDLCRQNWQGYEIHKIFGSARA

SEQ ID NO: 1792 - protein, 187 aa, Kosakonia cowanii
MQILTFQQSNGNNADPLRSNYQGVPRNNCKLKNIREAVKAWNRATPGPAQMHISQLVAEEWKARGGRGLLLAGSEHNTRQNFFRMINDPGPKNDKNLMLLIPVIINVMARDNEQVARRFGLISGKTKAELIADAMKECAEAKQAVLLNVPEHQKLKEVSEGIASLFRLMPEQTGSLMTIVMSMLGGI

SEQ ID NO: 1793 - protein, 42 aa, Kosakonia cowanii
MTVLKMVKTVVRQHSRSSGAITVSNREVIMTNAFLKYQVKGA

SEQ ID NO: 1794 - protein, 269 aa, Kosakonia cowanii
MSEHKVVLITGVSSGIGRAAALAFKARGCQVFGTVRDINSASPLNGITLTEMDVRDEHSVQQAIERVIAKAGCIDVLVNSAGVSLVGAVEETSVEEATRLFDTNFFGALRTTRAVLPHMRSQKSGRIVNVSSVLGFLPAPFMGIYAASKHALEGMSETLDHELRGSGVRATLVEPSFTRTKLDVNSAETAEKIAFYKDARDQTLGAILKKAGTASLPEVVAGTIVAATLGPWKMRYTPGGEATLLARLRRFAPASMVSKGLRKTFEMKE

SEQ ID NO: 1795 - protein, 195 aa, Kosakonia cowanii
MRLNAKELIAEARVTASTLPPAAAKLMTAMADRLDLQFVALCESRNEVKQLAAENAALKSNLMFWDAEDPEVPYCSPEDIANEIMLGYNEEFDVQVAARLPNRKYRVCKLTESEREIELLDGGDIATPATDVILDSLRAEAISDALENSSEYHDTDCVMDRHDISYVDAELRAAGAMELHDSLVAVASDLRNKAG

SEQ ID NO: 1796 - protein, 422 aa, Kosakonia cowanii
MIYTTGSIAVSDNTLTGTGTNFTAADSLIRSGCTVLALTSPAQAFQITAITSATSLTVTPAASPAVPPGTKFAILLSDSLSVDGLAQDIAETFTMYQRYMGGFADVMKGVGDVTITINGEPVTVPGQKSLVKKGANSDITSLSGLTTALSIEQGGTGAKDAAGARKALQLGGAATLDVGTAAGTVAAGNDPRLTTLDGKSGGSITGRISMPAGAVGTYLSASQNAGVRQRVVNDTSATSAVGALTWGYNNGSGFQLDTTWGSVGLGASAWPYTFMMQTANETQFGARIWTFSMSSGDIICSGSGNQAGTFTFTKASNSDREIKHDIVYTDGQESYENVKKYSPTSFVYNDDQQGRKRRGVIAQDVQEIDPEYVRAILNPFTLKTSLSLDTNVMLLDVALALKVAISKIEALEETVQQLRYGS

SEQ ID NO: 1797 - protein, 236 aa, Kosakonia cowanii
MRDKTISAILAHAAQAFPAECCGVVIQKGRVEKYVACRNLATSPEEQFELSPEDYAAAEEQGTVVAVVHSHPGDGATTQPSELDMLMCDATEVPWVIASWPEGDIRTIMPRGDRPLTGRQFVLGHADCWSLIRDYFRTEHGISLPDYSVERHWWEEGENLYMDNWHSCGFREFDGPPQPGDMVIMQVQASVPNHAGILLEGNMLLHHLYGQLSQRIPYGGYYRDRTIKVLRYKDLM

SEQ ID NO: 1798 - protein, 675 aa, Kosakonia cowanii
MGRALGLIGGVPGLVMLGAGAWYAMYQSQEQARQSAQEYARTIDQVSQKTRAMSLPEADENRGKTIDALVEENRLIGEQQKAISAVKRQIDDLNKARAQPGLTKDNDLNIVRALAILTDQLTVEENKLNLMREKSTSIQQVLEGIDRRRNDLIREQAWRQNAAYQSLLMMNGQHQTFNQLLGLGNQLLMARQGMTLAPLRVPQAEASQKQTDALEKSRRELALSRLKGEAKERARLGYAADELGLTADPQFQTNRLEYINNGLEEWRNNEANKKQPKGPKTDEEKAADAYKRMIKQQKEQIALQGQSTELARVKYQVVEGELSTLDKAQKAELMRNAAIIDQVKLREQLRNYEANLADSNAGARAANDAQLIGYGQGTRFRERMQEQFNIRKEFEQKNTDLLRQRQAGDIDETFYQQGLALNKRYLEERLRDQEGYYTDSDAQRGDWLTGMSEGYANWVDEATDYSAMAADGMKQAMGGAVTTITDMLNGNLDSWKDWGMNVLKIIETVLVNMMVANAASSLGSLFSFGASSAATASSGTAIQSAASNFTFNAKGGVYDSPSLSAYSGGVYQTPQLFAFAKGAGVFGEAGPEAIMPLTRAADGSLGVRAVGAPQFSGGGPSVSFGDININGGAQSTAGQGAAATAGRQLKDAIVTVINEQASMPGSPLWRLLKGA

SEQ ID NO: 1799 - protein, 1256 aa, Kosakonia cowanii
MTTTIIKGRKGGGTKTRTPVEAPDSIQSIARAKILVALGEGEFAGGLDGRSIYLGDASSYTPLQNADGSYNFNNVKYEFRSGTQDQSYIQGFPGVENELQIAYELKAAVPYVRSVSNTQLSALRIRLGWPSLLNQKDNGDKVGTRVEYAIDLSVDGGAYDTVIDGAVDDKTTTLYERSHRIDLPKATTGWQLRVRRITPDSTTVNVVDSMRVEAVTEIIDAKLRYPNTALLYVEFDAKQFPNGIPQVVCNPKGRIIRVPDTYDPETRTYSGTWEGGFKWAWTDNPAWIYYDIVLNERFGLGQRIDATQIDKWELYRIAQYCDQLVPDGKGGSGMEPRFRCNVYIQERNDAWTVLRDLAGIFRGMTYWGDNKLYVLADMPRDLWHIYNHASVVDGKFTFADPSETTRNTAALVNWSDPANHYKDTPEVVYDNDLAMRFDYSQLEMTAIGCTRQSEANRRGRWALLTNGIGEVVTFSTGMDVPPVGEVIGVAANELAGRVIGGRVSAVSGRNITLDRAADVKAGNRLFLNLPSGVAQARTVQAVNGNIVTVTTTYSETPEAGCCWGVDADDLFIALFRVTGTRDNDDGTFEVTGATYSPDIYAAVDTGARLDERPVSVIPPGVQAPPENILIDSYSTVSQNIAITTMRIAWDAVKGAIAYEAEWRRDSGNWVSVPRTSSLGFEVPGIYAGRYLVRVRAVNASDVSSIWATSAEVTLTGKVGNPPKPVGFTASETVVFGIELNWGFPANTDDTLKTEIQYSLTGTDDDAMLLADVPYPLRKYQQMGLKAGQVFWYRAQLVDRTGNESGYTNWVRGQSSSDVTDITEAVLEQIKDTDLFKDLIENAVESSQAVADLAEAVKQNADGLAAAAGANRQTAEAIIGNALAIADVVVRQSAQQGANSARFEQLREVIATETEARVTDVIRLEAKTDQNAAGITEVRQALSNESEARASAVDELTAKTEKNAANVTVLNQTVTDLDSSTASRFEEISAEIAGIDGSDIRGGIQSNSIALITNTLAQVNTRNLLSVQYGANAAGIQRVDTVMADASQAVAESLRTLDASAGGGTANATDFAKTMADFSQVSATRINTLSVTVNGQTSAISTNAQAVADISGNLNAMYSIKVGVDANGRQYAAGMGIGVQNTPAGMQAQVLFLADRFAVMTQAGGTVSLPFVVQNGQTFINEAFINYASITLAKVGSWYSANYVAGQTGTIMRADGSFELNGAVSGEGAMKITHVTQSVKDENGVLRVQIGKLTGAF

SEQ ID NO: 1800 - protein, 252 aa, Kosakonia cowanii
MSISSDVQKLEPGSRVRLIEVDGEAFGAGILRFHNETIPHTEAEIIAADGDASKLPPKSVWWQGLEYGAWPFELTGLSVSSDGQSARPTLTVANISGTIGALCRRFQGMAKAKVIIHETFAHYLDARNFSGGNPAANPNEERKQVYYIDRKSSSDDETVEFELSSPADLRGQLIPTRQIQPMCTWCMRGWYKTGNGCTYAGQNGWFDKDGNPVDDPSKDVCSGLLSTGCKPRFGANNELDYGGFPGASLLRG

SEQ ID NO: 1801 - protein, 199 aa, Kosakonia cowanii
MEKRTVIKLSGSMAQRFGRTHRRALSSASEVFRALSSTVDGFEDYLREARARGLDFVIFRDRRNISQEEFSLLGPGDELRIIPVIRGSKRAGIFQAVLGVALIAGGIALGPAGAGLIGKGVALNVALVGASMALGGVVQLLSPQVAGMRMRQDPDNKPSYAFGGPVNTTASGNPVSLLYGQREIGGAIISAGIYAEDQQ

SEQ ID NO: 1802 - protein, 252 aa, Kosakonia cowanii
MNLESLPKFYSPKSPKLNDQTPATGGVALTITDVMAAQGMVQSKASLGFNLFLAKMGIQDPAPAIDGLMQYALALKNPVLGKLSEKARGEVLPVLVQFAYADYSRSAASKSTCPHCEGKGVVREMQDVVKHPGVNGVEATVKHEAVEVMCQHCTGKGDVGTACRGCKGKGTVLDEKRTNLLGAPVRKVCGRCNGNRFSRLPTTLARVRIEKIIPDLTSYQWYSGYGDVIALLVTKCWQEEAFAEVQLRKVTR

SEQ ID NO: 1803 - protein, 112 aa, Kosakonia cowanii
MAVETFSWCPKVSAQADISFRTRKAQFGDNYAQVSGDGINPVTPQWSVSFTGDEEYVQAIKAFLKRHAGWKSFIWKPPLEPAGLWRSESLQIATHGADLYTLSTTFIQAYHP

SEQ ID NO: 1804 - protein, 206 aa, Kosakonia cowanii
MKEKFIEWFTAGNSGYTPAIDADGKFEKEKTQHMWEAYQAGLASAESQVKQLAAENAALKDEVPMGAIENGRAFAERLEAYPFECQGGNLNMCSDWQELRRCFEHLSEWAMHSQAGTPATDAILASLRAEGVEMLLTENFKAEIAGTLADFDGVDDATLQTVIWSGQPPEPDGDVWHIEYMTRGYQVQKKIREFAAQLRSKSEVQS

SEQ ID NO: 1805 - protein, 141 aa, Kosakonia cowanii
MKFTDIREDRLFVIQEKTGNKLAIPLDLKLEAADLHLKEVIERCRVNNPSEFLLYSPVRRGGRKPGPLTPDGLTQAFSDTRDVTVLKFGPYPPSFHEIRSLASRLYEKEKGEEFAQRLLGHKNLSMTKKYLDSRGAEYVRV

SEQ ID NO: 1806 - protein, 69 aa, Kosakonia cowanii
MESGCASNTPPLCYNEAVVMKNRVSVPVFGIRKSVRTTEYLSGGSFGYQWIERSVITDTSSFDRLLVTE

SEQ ID NO: 1807 - protein, 169 aa, Kosakonia cowanii
MAKLTDKQELFAREFIKDLNATQAAIRAGYSEKTARAIGCENLTKPDIQLRIAELNQERMERVQIDADYVLRQAVKLHERCMQEVEPITDRRGEEVTDEQGRTVYGFDAKGAAAALKLVGEHITVQAFKTNVKAEHVGKDGKPIEVVNYSPADYKAAQSQLEGKLKGLD

SEQ ID NO: 1808 - protein, 201 aa, Kosakonia cowanii
MRKPSRRKCKVCGEYFVPEFHDIRIRWCCPEHGAIFAMELRAKEKLKAEAKRIKAKHEAEKADRKRLAEKKQQVKPLSYFIKQAQQAFNEFIRYRDRGEACISCGRHHEGQYHAGHFRTTGANPELRFNEDNCHRQCAPCNNHLSGNLTAYRPALIAKIGQARFDALMGPHEMPKWKREDYIRIRDEYRAKLKTVKQEEAA

SEQ ID NO: 1809 - protein, 181 aa, Kosakonia cowanii
MRMNAKELIAEARVTAPTLPPAAAKLMTAMADRLDVQFVALCESRNEAKQLAGENALMKSAIKTHSKSVHFCVGCGKDDPCSNDDVCYVLEETPATDAFLTSLRAEARKQGAVFAANRMLAAWDAGFIEDTPENAADIARAILMSTELMDEAPDGDFDRTFSDEMLEAIAAQLRSKSEVPS

SEQ ID NO: 1810 - protein, 115 aa, Kosakonia cowanii
MNLPESVGPVPVVRTPDGYWCHPALTAFYRDRDCVPQAEYDHWLVSNGLEDTLVCLDADDDTPAAQAYARNADISYWTPPVPAGEGWFTGAIFDSEDDGPACIWLRRREVPCDAG

SEQ ID NO: 1811 - protein, 421 aa, Kosakonia cowanii
MIYTTGSIAVSGYTLTGTGTNFTAAGSLIRNGCTVLALTSPVQAFQIASIDSATGLTVTPAAIPAVPAGTKFAILLSDSLSVDGLAQDISETFSMYQRYMGGFADVMNSSGDVTITINGQPVTVPGQKSLAKKGANADITSLNGLTTAITLAQGGTGAKTAAGARTSLGLGSMATQSSDAVNITGGSGTFTSLSSDAVTITGGTASLGTIETKAGAEQPLVIRTAPSGLGYIRFRDASENPLAYLGFGASGAQHFILASNIGVNSVTLNTTGAVTVKAGGANYAFQTNGTATGQLWQSTSDVRIKKDIKPITNAREVISAISGYTFKKRYNLYEVAEPLYTEEAGILAQELELVAPEAVSKNDFGAHDLENNPIDDLRAVNYAGITPYLIELAKLHEAEITDLKGEVAQLKALVSVMAQGS

SEQ ID NO: 1812 - protein, 94 aa, Kosakonia cowanii
MRDKTISAILAHAAQSFPAECCGVVIQKGRVEKYIACRNLATSPEEQFELSPDDYAAAEEQGTVVAVVHSHPGDGSTTQPSELDMLMCDATEVP

SEQ ID NO: 1813 - protein, 128 aa, Kosakonia cowanii
MPRGDRPLTGRQFVLGHADCWSLIRDYFRIEHNIDLPDYSVDRHWWEEGENLYMDNWHDCGFREFDGPQQPGDMVIMQVQASVPNHAGVLLEGNMLLHHLYGQLSQRIPYGGYYRDRTIKVLRYRDLM

SEQ ID NO: 1814 - protein, 111 aa, Kosakonia cowanii
MAETFSWCPKVAAQADTSFRTRKAQFGDNYAQVAGDGINPVTSQWSVSFTGDEAYVQVIKAFLKRHAGWKSFIWKPPLEPAGLWRSESIQIATHGADLYTLSTTFIQAYHP

SEQ ID NO: 1815 - protein, 1163 aa, Kosakonia cowanii
MATLRELIIKISADSSSFQSEITRASRMGSNYYRTMQAGGRQAAAAAKESERALSDLTNGFASAGKAAAAATAAFATGKLVQIADEWNSVNARLQQASASADDFATSQRQLMEISQRTGTAFSDNANLFARAAASMREYGYSSEEVLKITEAVSTGLKLSGASTQESSSVITQFSQALAQGVLRGEEFNAVNESGDRVIRALATGMGVARKDLKSMADQGKLTIDKVVPALMSQLGALQGEFATMPQTVSGSLQKVTNSFMGWVGGVNAATGATDALSGGLDGVAQTLDSFTSSAVSGALSDVADNMSVITTVAGALVGVGLAKYLSGIVTSATSATGALISAAKSEVALAVAQDRAAQSAVAASRADVYRAQQALQRAKGADVQAAQQEKLAAAEAKVTAAQARLTTALAGGTATEKVRARAALERAQAGLAAAKNADVQAVAERRLAQAEAARDRNLANRVSTQSNLNSVTAVGSRLMSSALGIIGGIPGLVMLGAGAWYAAYQNQEQARRSAQEYGRTIDEISKKTRAMSLPEASDNSEKAKKALDEQNRLIDEQKSKIESLKEQIAGSQYLINNPGPTTKGGFMINHLTSLKTVTDDLSTATEQLSVEQERLSQMQEKAASIQQTLEGLQYRRVLLIREEAANQNSAYQSLLMMNGQHEKFNQLLGLGNQLLMARQGMTLAPLRVPQAEASQKQTEALEKSRRELALSRLKGEAKERARLGYAADELGLTADPQFQTNRLEYINNGLEEWRNNEANKKQPKGPKTDEEKAADAYKRMIKQQKEQIALQGQSTELARVKYQVVEGELSTLDKAQKAELMRNAALIDQVKLREQLRNYEANLADSNASARAANDAQLIGYGQGTRFRERMQEQFNIRKEFEQKNTDLLRQRQAGDIDETFYQQGLALNKRYLEERLRDQEGYYTASDAQRGDWLTGMSEGYANWVDEATDYSAMAADGMKQAMGGAVTTITDMLNGNLDSWKDWGMNVLKIIETVLVNMMVANAASSLGSLFSFGASSAATASSGTAIQSAASNFTFNAKGNVYDSPSLSAYSGGVYQTPQLFAFAKGAGVFGEAGPEAIMPLTRAADGSLGVRAVGAPQFSGGGPSVSFGDININGGAQSTAGQGAAATVGRQLKDAIVTVINEQASMPGSPLWRLLKGA

SEQ ID NO: 1816 - protein, 1253 aa, Kosakonia cowanii
MTNTAIKGRKGGGNKTRTPVEAPDSIQSIARAKILVALGEGEFAGGLDGRSIYLGDASSYTPLQNADGSYNFNNVKYEFRSGTQDQTYIQGFPGVENELQVAYELKAAVPYVRSVSNTQLSALRIRLGWPSLLNQKDNGDKVGTRVEYAIELSVDGGAYAPVVKGAVDDKTTTLYERSHRIDLPKATTGWQLRVRRITPDSTTVNVVDSMRVEAVTEIIDAKLRYPNTALLYIEFDAKQFPNGIPQVVCNPKGRIIRVPDTYDPETRSYSGTWEGGFKWAWTDNPAWIYYDIVLNERFGLGQRIDATQIDKWELYRIAQYCDQLVPDGKGGSGMEPRFRCNVYIQKRNDAWTVLRDLAGIFRGMTYWGDNKLYVLADMPRDIWHIYNHASVVDGKFTFADPSETTRNTAALVNWSDPANHYKDTPEVVYDNDLAMRFDYSQLEMTAIGCTRQSEANRRGRWALLTNGIGEVVTFSTGMDVPPVGEVIGVAANELAGRVIGGRVIAVSGRNITLDRAADVRAGNRLFLNLPSGVAQARTVQAVKGNVVTVTTAYSETPEAECCWGVDADDLFIALFRVTGTRDNDDGTFEVTGATYSPDIYAAVDTGARLDERPVSVIPPGVQAPPENIVIDSYSTVSQNIAITTMRVAWDSVKGAIAYEAEWRRDSSNWVSVPRTSSQGFEVPGIYAGRYLVRVRAVNASDVSSIWATSAEVTLTGKVGNPPKPLGFTASENVVFGIELNWGFPAGTDDTLKTEIQYSLTGSADDAMLLADVPYPLRRYQQMGLKAGQIFWYRAQLVDRTGNESGYIDWVRGQSSTDVTDITEAVLAQIKDTELFKDLIENAVESSKAVADLAEAVKQNADGLAEAAGANRQTAEAIIGNALAIADVVVRQSAQQGANSATFEQLREVIATETEARVTDVIRLEAKTDQNAAGITEVRQALANETEARATAVDQLTAQTEENKASVTALTQTVTDLDSSTASRFEEISAEIAGIDGSDIRGGIQSNSIALITTTLAQVNDRTRLSVQYGDNKAGIERVDNVMADASQAVAESLRSMDASSGAGTANTTDFAKTMADFSQVSATKINSLSVTVNGQQAAIVQNAQVSADINNNLSAMYSIKVGVDANGRQYAAGMGLGVQNTPSGMQSQVLFLADRFAVMTQAGGTVSLPFLVQNGQTFINEAFINYASITLARVGSWYSANYVAGQTGTIMKADGTFEVNGAVSGQGRMQITNNRIISYDAQNRPAAVMGQRL

SEQ ID NO: 1817 - protein, 252 aa, Kosakonia cowanii
MSISSDVQKLEPGSRVRLIEVDGEAFGAGILRFHNETLPHTEAEIIAAGGDASNLQPKSVWWQGLEYGAWPFELTGLSVSSDGQSARPTLTVANISGTIGALCRRFQGMAKAKVIIHETFAHYLDARNFAGGNPGANPNEERKQVYYIDRKSSSDDETVEFELSSPADLRGQLIPTRQIQPMCTWCMRGWYKTGNGCTYAGQNGWFDKDGYRVDDPSKDVCSGLLSTGCKPRFGANNELDYGGFPGASLLRG

SEQ ID NO: 1818 - protein, 199 aa, Kosakonia cowanii
MEKRTVIKLSGSMAQRFGRTHRRALSSASEVFRALSSTVDGFEDYLREARARGLDFVIFRDRRNISQEEFSLLGPGDELRIIPVIRGSKRAGIFQAVLGVALIAGGIALGPAGAGLIGKGVALNVALVGASMALGGVVQLLSPQVAGMRMRQDPDNKPSYAFGGPVNTTASGNPVPLLYGQREIGGAIISAGIYAEDQQ

SEQ ID NO: 1819 - protein, 252 aa, Kosakonia cowanii
MNLESLPKFYSPKSPKLNDQTPATGGVALSITDVMAAQGMVQSKASLGFNLFLAKMGIQDPAPAINGLMQYAHALKNPVLGKLSEKARGEVLPVLVQFAYADYSRSAASKSTCPHCEGKGVVREMQDVVKHPGVNGVEATVKQEAVEVMCQHCAGKGELCTACRGCKGKGTVLDEKRTNLLGAPVRKVCGRCNGNRFSRLPTTLARARIEKIIPDLTSYQWYSGYGDVIALLVTKCWQEEAFAEVQLRKVTR

SEQ ID NO: 1820 - protein, 375 aa, Kosakonia cowanii
MAARPRKNNVSVPNLYPLYSRKVNKVYWRYKHPITGKFHALGTDEAEAIAIATEANTRLAEQRSRQIMAISDKIATSKGKAITTNTWLDRYWKIQGERLDSGDIKLNTYKQKAKPVALLRDRVGMKMISSVDVRDIAEVLEAYISDGQPRMAQVIRSVLIDVFKEAQHFGEVPPGYNPALATKQPRRRITRQRLNLEEWHKIFDIADANQKYMGNAMLLALVTGQRLGDISNMKFSDIWDDHLHIEQEKTGSKIAIPLSLRLNAINWSLREVVARCRDYAVSPYLVHFFRATSQAERGAQVKSNTITMNFSKARNEAGIDWGGGTPATFHEQRSLAERLYEAQGVDTQRLLGHKSPNQTARYHDDRGKDWNKVII

SEQ ID NO: 1821 - protein, 83 aa, Kosakonia cowanii
MKMINAAAVVLVSLMASGCASNTPPQCYNEAVVMKNRVSVPVFGIRKPVSTTEYLSGGSFGYQWIERSAFTDTSACDRLPVTE

SEQ ID NO: 1822 - protein, 317 aa, Kosakonia cowanii
MQMFIAGTSFDAINAMAASYVLDVITINGTGSKTYSLSGVSLTYAIVNDFMGGQLTGATYSVSVSGLTVSWNVNNAVTLIVYGSPVAGTQSDYFGFQLFQYINGARTVKLAPNYVPLCLRQIIDVPAGARTVQTQVPAGNPVMCFHRHTGEAMDLCWWKPVTASGYHALQFPTAASNQTGCRVYVFSNILANIPDYGFFLYRAGQMVWHSNCLPLQVIPLTNGDITSATPLAVSSSVTSHIFVPQDPAYPTGYSNFMCASAGKYGAAYKVQVGKVFQSTYISNPDEGRRMRGWACGGVGYIDTRFYDQYYKNALGIT

SEQ ID NO: 1823 - protein, 369 aa, Kosakonia cowanii
MLRLKPVTFAVCLLPFALVACGDASDNSDPRSQPPLVRSAAAINATDSSRAFTGVVVARIQSDLGFRVHGKILERLVDTGQAVKRGQPLMRLDPVDLSLQAQAQQQAVAAAKARARQTADDESRYRGLVTTGAVSASAYDQIKAAADTARADLSAAQAQANVAQNAMSYAVLVADDDGVVMDTLAEPGQVISAGQPVIRLARAGQREAVVQLPETLRPSVGSKAQASLYGSDKQPVSATLRLLSDAADPLTRTFEARYVLNGPLSGAPLGSTVTIHIAQGRTSQSLLQVPLAAVFDAGKGPGVWSISGNPARVAWRPVQVVSLGDDAASVTGSLKPGEQVVALGAHLLHDGETVRLAKQSDVSVAGSQP

SEQ ID NO: 1824 - protein, 1036 aa, Kosakonia cowanii
MSSGRFNLSALAVRERSVTLFLILLITVAGILSFLGLGRAEDPPFTVKQMTIISAWPGATAQEMQDQVAEPLEKRLQELKWYDRTETYTRPGLAFTMLSLQDSTPPSEVQEEFYQARKKLSDEARNLPAGVIGPMVNDEFSDVTFALFALKAKGEPQRLLVRDAESLRQRLLHVPGVKKVNIIGEQAERIFVSFSHDRLATLGISPQDIFAALNNQNVLTPAGSIDTRGPQVFIRLDGAFDKLEKIRETPVVSQGRTLKLSDVATVERGYEDPATFMVRNQSEPALLLGIVMREGWNGLDLGKALDKQAASINADMPLGMTFTKVTDQSVNISSAVNEFMIKFFVALLVVMVVCFLSMGWRVGVVVAAAVPLTLAVVFVIMEASGKNFDRITLGSLILALGLLVDDAIIAIEMMVVKMEEGYDRIKASAYAWSHTAAPMLAGTLVTAVGFMPNGFAQSTAGEYTSNMFWIVGIALIASWVVAVVFTPYLGVKMLPAIKTVEGGHDAIYNTRRYNRFRQLLTRVIARKWLVAGSVVAVFTVAVLGMALVKKQFFPTSDRPEVLVEVQMPYGTSIEQTSAAVTKIEDWLRHQKEAKIVTAYIGQGSPRFYLAMAPELPDPSFAKIVVLTDSQEAREALKFRLRQAAADGLAPEARVRVTQLVFGPYSPYPVAFRVTGPDPTVLRDIADKVKTLMQASPLMRTVNTDWGSRVPTLHFTLNQDRLQAVGLTSNAVAQQLQFLLSGVPVTAVREDIRSVQVMGRAAGDIRLDPAKIADFTLVGSAGQRIPLSQAGEVEVRMEDPVLRRRDRMPTITVRGDIAESKQPPDVSTAIMKQLQPIITTLPDGYRIDEAGSIEESGKATKAMVPLFPIMIAMTLLIIILQVRSMSAMVMVFMTAPLGLVGVVPTLLLFNQPFGINALVGLIALSGILMRNTLILIGQIHHNEQEGLAPFHAVIEATVQRSRPVLLTAMAAILAFIPLTHSVFWGTLAYTLIGGTLGGTIITLVFLPAMYAIWFRIKRPDSNSSTEKHSSSEGLKNV

SEQ ID NO: 1825 - protein, 488 aa, Kosakonia cowanii
MFPLNTLAVVVGACILTGCTVGPDYYRPEVPIAKHYHAQQALQQPTTSESASFSIWWENFGDPLLSRFVSDALTQNLDLAQASARMMQAQAGLGAATAALLPSGNISGQAARAYQSVETPLGQVLSSTPDYNRYGNSYEMDLNAGWEIDLFGGLRRGRQAALADYQASQAGVAATRLAVAAQTADIYITLRGLQSRLDIANKQVITQQQLLEKVQLLHSKGLASEYQVRQTEGALAQVKATVPVLNNGLDAAINALDVMLGAPPGTHHAQLASPGAIPHTPAIAAMGTPADLLRRRPDIIVAERHLAASSARIGVAVSEYYPKFSLNALLGSATAVSGDNLFIAGASQSAGVLGLRWRLFDFGRINAQIKQATGQEAEALAAYRLSVLRATEDVENAFSALVNRQTQAATLTSGETALASARQSSFFAFQQGTASLIDVLHNDETLLQASDARAQAQTESARAAVAAFRALGGGWQSTLSGEMANTPG

SEQ ID NO: 1826 - protein, 58 aa, Kosakonia cowanii
MNRKAFINDFISWINNNIESHLKIDDVAIKSGCSKWRLQRLFLAETGQVLGQFIREKS

SEQ ID NO: 1827 - protein, 67 aa, Kosakonia cowanii
MTPVYDLVRRADGKNVFSFPAGGRYLVDTSNGLQSMRPLMDDEIIFTVESAAHFLKKIGYQVIPPAA

SEQ ID NO: 1828 - protein, 66 aa, Kosakonia cowanii
MTFFIVWEAYTRDWQLMQKGSRFMSTDDADIIDVDLADYVAEMAKALGIEEKYFVITSVQQICVLK

SEQ ID NO: 1829 - protein, 163 aa, Kosakonia cowanii
MEFCSTSNTTRAADGAIKAASSIFRIVKSKEDCTRPDIDEADFAWFVAVVANAETEGVSVTHEATGVHLLKGSAGLAKSGWQMSLPRDPQGSGDMGIVEAEQEEGSSLIIRLYKRRYVLSEDRDIELQKGAAIDVPTTSWIDVRLDMQENSTWNHRVESAQEE

SEQ ID NO: 1830 - protein, 200 aa, Kosakonia cowanii
MNIPPLRGPSDHSVRDQVVEAATEHFSHFGYEKTTVSDLAKAIGFSKAYIYKFFDSKQAIGEVICANRLAMMMNIVNAAIADAPSASEQLRRLFKAVVEAGSDLFFHDRKLYDIAAVAARDKWPSAQAHEQRLRQLIEEIIKAGREAGEFERKTPLDEAADAIYLVMHPYVSPVQLQYNLETAPTAAVFLSSLILRSLAP

SEQ ID NO: 1831 - protein, 369 aa, Kosakonia cowanii
MLRPNPASLAICFLPLAIVACGDNGNSDDPRTQPPLVRTAPVMSAVDNARAFTGTVVARIQSDLGFRVPGKVLERLVDTGQTVTRGQPLMRLDPADLSLQAVSAAQAVSAAQARVRQAASDEARYRSLVTTGAVSASAYDQIKAAADTARADLKAAQAQASVAQNAMHYAVLLADGDGVVMATLAEPGQVVSAGQAVVRLARSGQREAIVQLPETLRPSLGSRAQATLYGRAGQAVPATLRLLSEAADPLTRTFEARYVLQGALASAPLGATVTLNITEGLSPRPLLQVPLAAVYDAGKGPGVWEVSGKPARVNWQPVEVVGITDDAARVMGNLQPGEPVVALGAHLLHEGEAVRQAKQSDSEIAGSRP

SEQ ID NO: 1832 - protein, 1028 aa, Kosakonia cowanii
MSGGGFNLSAIAVRERAITLFLIILITVAGSVSFFKLGRAEDPPFTVKQMTIISAWPGATAQEMQDQVAEPLEKRLQELQWYDRTETYTRPGLAFTMLSLQDSTPPSQVQEEFYQARKKLGDEAKNLPAGVIGPLVNDEFSDVTFALFALKAKGEPQRLLVRDAESLRQRLLHVPGIKKVNIIGEQAERIFISFSHDRLATLGISAQDIFAALNDQNVLTPAGSIDTRGPQVFIRLDGAFDTLEKIRQTPLVAQGRTLKLADVATVERGYEDPATFLVRNQGEPALLLGVVMREGWNGLALGEALDKEAASINAGMPLGMSLTKVTDQSVNISSAVDEFMIKFFVALLVVMVVCFLSMGWRVGVVVAAAVPLTLAVVFVIMEATGKNFDRITLGSLILALGLLVDDAIIAIEMMVVKMEEGYDRIKASAYAWSHTAAPMLAGTLVTAIGFMPNGFAHSTAGEYTSNMFWIVGIALIASWVVAVVFTPYLGVKMLPAIKPIEGGHAAIYNTRRYNQFRGLLARVIAAKWLVAGAVVVLFTVAILGMGLVKKQFFPTSDRPEVLVEVQMPYATSIAQTSATTAKIEAWLSQQKEAEIVTSYIGQGSPRFYLAMAPELPDPSFAKIVVRTGSQQAREALKFRLRHAVADGLAPEARVRVTQLVFGPYSPYPVAFRVTGSDPQVLRDIADKVKTVMQASPMMRTVNTDWGARVPTLHLTLDQDRLQAVGLTSSAAARQLQFLLTGVPITSVREDIRAVEVIGRAAGDIRLDPGKIAGFTLVGSAGQRIPLSQVGEVEVRMEEPLLRRRDRVPTITVRGDIAESLQPPDVSTAIMQQLQPLIAALPDGYQIEQAGSIEESGKATKAMAPLFPIMIAMTLLIIILQVRSLSAMVMVFMTAPLGLVGVVPTLLLFHQPFGINALVGLIALSGILMRNTLILIGQIHHNEREGLAPFDAVIEATVQRARPVLLTALAAILAFIPLTHSVFWGTLAYTLIGGTLGGTIITLVFLPAMYAIWYRINRPDPHEVKRAVG

SEQ ID NO: 1833 - protein, 114 aa, Kosakonia cowanii
MLKRLFEIDQMDVLDILRDDGTLKPITQWPKVWHITLQGMKISTTIQDFDENTTETILKKIKWSDKVKNLELLGKHISVQAFKEHVEQKVTATHNIMPIPACTSVDEWEKAAQQ

SEQ ID NO: 1834 - protein, 488 aa, Kosakonia cowanii
MFPLNTLAVVVGACILTGCAVGPDYYRPEVPIAKHYHAQQALQQPTTSESASFSIWWENFGDPLLSRFVSDALTQNLDLAQASARMMQAQAGLGAATAALLPSGNISGQAARTYQSVETPLGQVLSSTPDYNRYGNSYEMDLNAGWEIDLFGGLRRGRQAALADYQASQAGVAATRLAVAAQTADIYITLRGLQSRLDIANKQVITQQQLLEKVQLLYSKGLASEYQVRQTEGALAQVKATVPVLNNGLDAAINALDVMLGAPPGTHHAQLASPGAIPHAPAITAMGTPADLLRRRPDIIVAERHLAASSARIGVAVSEYYPKFSLNALLGSATAVSGDNLFTAGASQSAGVLGLRWRLFDFGRINAQIKQAKGQEAEALAAYRLSVLRAAEDVENAFSALVNRQTQAATLTSGETALASARQSSFVAFQQGTASLIDVLHNDETLLQASDARAQAQTEAAHAAVAAFRALGGGWQSTLSEEIANTPG

SEQ ID NO: 1835 - protein, 277 aa, Kosakonia cowanii
MVNIINKKSLFILSMMACSTSYAASFDCNTVASGVEKMICSDHKLSRLDDYLSQNYKIAMGPDMPEEAKSKIRKSQIDWLNKRNACTDAQCIERMYSKQMDYLWNECFDHLSGKIEYIKFSEAIDKIKRDLASQEYNKTHKTPEEVIRELSTKNTNKVQQLGFNNKQLDSILFLDGFGSYFEYHTLRESLSLIYELPDLTSLEMINYKGYAGFKIKTTGRPSSGFIFREENGEIYLNGLVSGDKVIEATTENDMRELARIFLSYTGYVIDNNNSKDL

SEQ ID NO: 1836 - protein, 195 aa, Kosakonia cowanii
MRMNAKELIADARVKAPTLPPAAAKLMTAMADRLDLQFVALCESRNEVKQLAAENAVLKSNLMFWDAEDPEVPYCSPEDIANEIMLGYNEEFDVQVAARLPNRKYRVCKLTESEREIELVDGGDIATPATDVILDSLRAEAISDALENSSEYHDTDCVMDRHDISYEDAELRVAGAMELHDSLVAVASDLRNKAG

SEQ ID NO: 1837 - protein, 161 aa, Kosakonia cowanii
MRMNAKELIADARVTAPTLPLAAAKLMTAMADRLNVQFVALCESRNEAKQLAGENALMKSAIKTHSESVHFCVGCGKDDPCSNDDVCYALEETPATDAFLASLRAEAISDSLENSSEYLDTDCVMDRHDISYQDAELRAAGALELHDSLVAVASDLRNKAG

SEQ ID NO: 1838 - protein, 441 aa, Kosakonia cowanii
MIYTTGSIAVSGNTLTGTGTNFTAAGSLIRNGCTVLALTSPAQAFQITSVDSATGMTVSPAASPAVPAGTKFAILLSDSLSVDGLAQDIAETFSMYQRYMGGFADVMNGSGDVTITINGQPVTVPGQKSLAKKGANTDITSLGGLTTALSIQQGGTGAKDASQGWLNLLNGRTPATARGDLQLGTAAVRDTYSTTGAILSVGDFGIGGTSGGAIVTNANLINANGIWGAGGSGGLNYFDNYSPILMMFRTPTTSGQLQATIDGKLAVRGYNGSTMSAWNQCYTTGNTTRAADGTIKAASPIVRIVKSKEDCTRPDIDEADFGWCGTGVANAEAGGVTLTRQETGVYLLKGSAGLAKSGWQMSPPRDPQGSGDMGIVEAEQGEDGTLIIRLYKRRYILSDDGDIELQKGVAIDVPPTSWIDVRLDMPENSIWNQRAESAQEE

SEQ ID NO: 1839 - protein, 481 aa, Kosakonia cowanii
MIYTTGSIAVSGNTLTGTGTNFTAAGSLIRNGCTVLALTSPAQAFQITSVDSATGLTVTPAASPSVPAGTKFAILLSDSLSVDGLAQDIAETFSMYQRYMGGFADVMNGSGDVTITINGQPVTVPGQKSLAKKGANTDITSLGGLTTALSIQQGGTGGKTAAEARNKIGAASSGNNSDITGITGLTTALSIQQGGTGAKDASQGWLNLLNGRTPASARGDLQLGTAAVRDAYSTTGAILSVGDFGIGGTSGGAIVTNANLINANGIWGAGGGSGQNYFDNYSPILMMFRTPTTSGQLQATIDGKLAVRGYNGSTMSAWNQCYTTGNTTRAADGTIKAASPIVRIVKSKEDCTRPDIDEADFEWCGAGVANGEAEGVTLTREATGVYLLKGSAGLAKSGWQMSPPRDPQGSGDMGIVEAEQAEDGSLIIRLYKRRYVLSEDGDIELQKGVAIDVPPTSWIDVRLDMPEKSIWNQRAESTKEE

SEQ ID NO: 1840 - protein, 236 aa, Kosakonia cowanii
MRDKTISAILAHAAQSFPAECCGVVIQKGRVEKYIACRNLATSPEEQFELSPDDYAAAEEQGTVVAVVHSHPGDGSTTQPSELDMLMCDATEVPWVIASWPEGDIRTIMPRGDRPLTGRQFVLGHADCWSLIRDYFRIEHNIDLPDYSVDRHWWEEGENLYMDNWHDCGFREFDGPQQPGDMVIMQVQASVPNHAGVLLEGNMLLHHLYGQLSQRIPYGGYYRDRTIKVLRYKDLM

SEQ ID NO: 1841 - protein, 236 aa, Kosakonia cowanii
MRDKTISEILAHAAQAFPAECCGVVIQKGRVEKYIACRNLATSPEEQFELSPEDYAAAEEQGTVVAVVHSHPGDGATTQPSELDMLMCDATEVPWVIASWPEGDIRTIMPRGERPLTGRQFVLGHADCWSLIRDYFRTEHGIALPDYSVDRHWWEEGENLYMDNWYACGFREFDGPSRPGDMVIMQVQASVPNHAGVLLEGNMLLHHLYGQLSQRIPYGGYYRDRTIKVLRYKDLM

SEQ ID NO: 1842 - protein, 112 aa, Kosakonia cowanii
MAVETFSWCPKVAAQADTSFRTRKAQFGDNYAQVAGDGINPVTSQWSVSFTGDEAYVQVIKEFLKRHAGWKSFIWKPPLEPAGLWRSESIQIATHGADLYTLSTTFIQAYHP

SEQ ID NO: 1843 - protein, 1163 aa, Kosakonia cowanii
MATLRELIIKISADSSSFQSEITRASRMGSDYYRTMQAGGRQAAAAAKESERALSDLTNGFASAGKAAAAATAAFATGKLVQIADEWNSVNARLQQASASADDFATSQRQLMEISQRTGTAFSDNANLFARAAASMREYGYSSEEVLKITEAVSTGLKLSGASTQESSSVITQFSQALAQGVLRGEEFNAVNESGDRVIRALATGMGVARKDLKSMADQGKLTIDKVVPALMSQLGALQGEFATMPQTVSGSLQKVTNSFMGWVGGVNAATGATDALSGGLDGVAQTLDSFTSSAVSGALSDVADNMSVITTVAGALVGVGLAKYLSGIVTSATSATGALISAAKSEVALAVAQDRAAQSAVAASRADVYRAQQALQRAKGADVQAAQQEKIAAAEAKVTAAQARLTTALAGGTATEKVRARAALERAQAGLVAAKNADVQAVAERRLAQAEAARDRNLANRVSTQSNLNSVTAVGSRLMSSALGIIGGIPGLVMLGAGAWYAAYQNQEQARRSAQEYGRTIDEISKKTRAMSLPEASDNSEKAKKALDEQNRLIDEQKSKIESLKEQIAGSQYLINNPGPTTKGGFMINHLTSLKTVTDDLSTATEQLSVEQERLSQMQEKAASIQQTLEGLQYRRVLLIREEAANQNSAYQSLLMMNGQHEKFNQLLGLGNQLLMARQGMTLAPLRVPQAEASQKQTEALEKSRRELALSRQKGEAKERARLGYAADELGLTADPQFQTNRLEYINNGLEEWRNNEANKKQPKGPKTDEEKAADAYKRMIKQQKEQIALQGQSTELARVKYQVVEGELSTLDKAQKAELMRNAALIDQVKLREQLRNYEANLADSNASARAANDAQLIGYGQGTRFRERMQEQFNIRKEFEQKNTDLLRQRQAGDIDETFYQQGLALNKRYLEERLRDQEGYYTASDAQRSDWLTGMSEGYANWVDEATDYSAMAADGMKQAMGGAVTTITDMLNGNLDSWKDWGMNVLKIIETVLVNMMVANAASSLGSLFSFGASSAATASSGTAIQSAASNFTFNAKGGVYDSPSLSAYSGGVYQTPQLFAFAKGAGVFGEAGPEAIMPLTRAADGSLGVRAVGAPQFSGGGPSVSFGDININGGAQSTAGQGAAATAGRQLKDAIVTVINEQASMPGSPLWRLLKGA

SEQ ID NO: 1844 - protein, 675 aa, Kosakonia cowanii
MGRALGLIGGVPGLVMLGAGAWYAMYQSQEQARQSAQEYARTIDQVSQKTRSMSLPEADDNRRKTVEALVEQNRLIDEQGKAVSAVKRQIDELNKARGQPGITKDNDLNIVKSLSILTDQLTVEENKLYLMREKSASIQQVLEGIERRRNDWIREQAWRQNAAYQSLLMMNGQHEKFNQLLGLGNQLLMARQGMTLAPMRVPQAEASQKQTEALEKSRRELALSRLKGEAKERARLGYAADELGLTADPQFQTNRLEYINNGLEEWRNNEANKKQPKGPKTDEEKAADAYKRMIKQQKEQIALQGQSTELARVKYQVVEGELSTLDKAQKAELMRNAALIDQVKLREQLRNYEANLADSNASARAANDAQLIGYGQGTRFRERMQEQFNIRKEFEQKNTDLLRQRQAGDIDETFYQQGLALNKRYLEERLRDQEGYYTASDAQRGDWLTGMSEGYANWVDEATDYSAMAADGMKQAMGGAVTTITDMLNGNLDSWKDWGMNVLKIIETVLVNMMVANAASSIGSLFSFGASSAATASSGTAIQSAASNFTFNAKGGVYDSPSLSAYSGGVYQTPQLFAFAKGAGVFGEAGPEAIMPLTRAADGSLGVRAVGAPQFSGGGPSVSFGDININGGAQSTAGQGAAATAGRQLKDAIVTVINEQASMPGSPLWRLLKGA

SEQ ID NO: 1845 - protein, 849 aa, Kosakonia cowanii
DPSETTRNTAALVNWSDPANHYKDTPEVVYDNDLAMRFDYSQLEMTAIGCTRQSEANRRGRWALLTNGIGEVVTFSTGMDVPPVGEVIGVAANELAGRVSAVSGRNITLDRAADVRAGNRLFLNLPSGVAQARTVQAVKGNVVTVTTAYSETPEAECCWGVDADDLFIALFRVTGTRDNDDGTFEVTGATYSPDIYAAVDTGARLDERPVSVIPPGVQAPPENIVIDSYSTVSQNIAITTMRVAWDSVKGAIAYEAEWRRDSGNWVSVPRTSSQGFEVPGIYAGRYLVRVRAVNASDVSSIWATSAEVTLTGKVGNPPKPLGFTASENVVFGIELNWGFPAGTDDTLKTEIQYSLTGSADDAMLLADVPYPLRRYQQMGLKAGQILWYRAQLVDRTGNESGYTDWVRGQSSTDVTDITEAVLAQIKDTELFKDLIENAVESSKAVADLAEAVKQNADGLAEAAGANRQTAEAIIGNALAIADVVVRQSAQQGANSAKFEQLREVIATETEARVTDVIRLEAKTDQNAAGITEVRQALANETEARATAVDQLTAQTEENKASVTELTQTVTDLDSSTASRFEEISAEIAGIDGSDIRGGIQSNSIALITTTLAQVNDRIRLSVQYGDNKAGIERVDNVMADASQAVAESLRSLDASSGAGTANTTDFAKTMADFSQVSATKINSLSVTVNGQQAAIVQNAQVSADINNNLNAMYSIKVGVDAAGRQYAAGMGIGVQNTPSGMQSQVIFLADRFAVMSQAGGTVSLPFVIQNGQTFINEAFINYASITLARVGSWYSANYVAGQTGTIMKADGTFEVNGAVSGQGRMQITNNRIISYDAQNRPAAVMGQRL

SEQ ID NO: 1846 - protein, 868 aa, Kosakonia cowanii
DPSETTRNTAALVNWSDPANHYKDTPEVVYDNDLAMRFDYSQLEMTAIGCTRQSEANRRGRWALLTNGIGEVVTFSTGMDVPPVGEVIGVAANELAGRVIGGRVSAVNGRNITLDRAADVKAGNRLFLNLPSGVAQARTVQAVKGNVVTVTTAYSEPPEAECCWGVDADDLFIALFRVTGTRNNDDGTFEVTGATYNPDIYAAVDTGARLDERPVSVIPPGVQAPPENIVIDSYSTVSQNIAITTMRAAWKPVKGAIAYEAEWRRDSGNWVSVPRTSSQGFEVPGIYAGRYLVRVRAVNASDVSSIWATSAEVTLTGKVGNPPKPLGFTASENVVFGIELNWGFPSNTDDTLKTEIQYSLTGSADDAMLLADVPYPLRRYQQMGLKAGQIFWYRAQLVDRTGNESGYTDWVRGQSSTDVTDITEAVLEQIKDTDLFKDLIENAVESSAKVAELAEAVRQNADGLAAAAGSNKQMAEAIIGNALAIADVVVRQSAQQGANSAKFEQLREVIATETEARVTDVIRLEAKTDQNAAGITEVRQALANETEARATAVDQLTAQTEENKASVTELTQTVTDLDSSTASRFEEISAEIAGIDGSDIRGGIQSNSIALITTTLAQVNDRTRLSVQYGDNKAGIERVDNVMADASQAVAESLRSMDASSGAGTANTTDFAKTLADFSQVSATKINSLTVTVNGQQAAIVQNAQVSADINNNLSAMYSIKVGVDANGRQYAAGMGIGVQNTPVGMQAQVLFVADRFAVMAQAGGTVSLPFVIENGQTFVNDAFFRDASIQFGKITDSLKSDNYVAGSAGWNLPKSGNAEFNQVTVRGAIYATNGNFNLTGPGNTTVINGLGVTVNLANGGLIRLGSW

SEQ ID NO: 1847 - protein, 252 aa, Kosakonia cowanii
MSISSDVQKLEPGSRVRLIEVDGEAFGAGILRFHNETLPHTEAEIIAAGGDASKLQPKSVWWQGLEYGAWPFELTGLSVSSDGQSARPTLTVANISGTIGALCRRFQGMAKAKVIIHETFAHYLDARNFAGGNPGANPNEERKQVYYIDRKSSSDDETVEFELSSPADLRGQLIPTRQIQPMCTWCMRGWYKTGNGCTYAGQNGWFDKDGNRVDDPSKDVCSGLLSTGCKPRFGANNELDYGGFPGASLLRG

SEQ ID NO: 1848 - protein, 252 aa, Kosakonia cowanii
MSISSDVQKLEPGSRVRLIEVDGEAFGAGILRFHNETIPHTEAEIIAAGGDASKLQPKSVWWQGLEYGAWPFELTGLSVSSDGQSARPTLTVANISGTIGALCRRFQGMAKAKVIIHETFAHYLDARNFSGGNPAANPNEERKQVYYIDRKSSSDDETVEFELSSPADLRGQLIPTRQIQPMCTWCMRGWYKTGNGCTYAGQNGFFDKDGNPVDDPSQDVCSGLLSTGCKPRFGANNELDYGGFPGASLLRG

SEQ ID NO: 1849 - protein, 165 aa, Kosakonia cowanii
LSSTVDGFEDYLREARARGLDFVIFRDRRNISQEEFSLLGPGDELRIIPVIRGSKRAGIFQAVLGVALIAGGIALGPAGAGLIGKGVALNVALVGASMALGGVVQLLSPQVAGMRMRQDPDNKPSYAFGGPVNTTASGNPVPLLYGQREIGGAIISAGIYAEDQQ

SEQ ID NO: 1850 - protein, 252 aa, Kosakonia cowanii
MNLESLPKFYSPKSPKLNDQTPATGGVALTITDVMAAQGMVQSKASLGFNLFLAKMGIQDPAPAIDGLMQYALALKNPVLGKLSEKVRGEVLPVLVQFAYADYSRSAASKSTCPHCEGKGVVREMQYVVKHPGVNGVEATVKHEAVEVMCQHCAGKGEVGTACRGCKGKGTVLDEKRTKLIGAPVRKVCSRCNGNRYSRLPTTLARARIEKIIPDLTSYQWYSGYGDVIALLVTKCWQEEAFAEVQLRKVTR

SEQ ID NO: 1851 - protein, 83 aa, Kosakonia cowanii
MKMINAAAVALVSLMASGCASNTPPQCYNEAVVMKNRVAVPVFGIRKPVSTTEYLSGGSFGYQWVERSAFTDTSSCDRLPVIE

SEQ ID NO: 1852 - protein, 317 aa, Kosakonia cowanii
MQMFIAGTSFDAINSMAASYVLDVITITGTGSKTYSLSGVSLTYAIVNDFMGGQLTGATYSVSVSGLTVSWNVNNAVTLIVYGSPVAGTQSDYFGFQLFQYINGARTVKLAPNYVPLCLRQIIDVPAGARTVQTQVPAGNPVMCFHRHTGEAMDLCWWKPVTASGYHALQFPTAASNQTGCRVYVFSNILANIPDYGFFLYRAGQMVWHSNCLPLQVIPLTNGDITSATPLAVSSSVTSHIFVPQDPAYPTGYSNFMCASAGKDGATYKVQVGKVFQSTYISNPDEGRRMRGWACGGVGYIDTRFYDQYYKNALGIP

SEQ ID NO: 1853 - protein, 148 aa, Kosakonia cowanii
LSTAFLKIGIIAQIDEATGYQYVRAEDALQVKLRAFVAEELREWEKTFPDDLWEQFGRLTRWKGSLNQRPKWWGHLVLELIYNALDPDIAKYLKENKPKPVHGKNYHQWMTQDIGLKALISHIYEIIGMAKTCSDMRELRDKVALHYG

SEQ ID NO: 1854 - protein, 117 aa, Kosakonia cowanii
MSESLNNKELVAVGHEFAKALSSDTPIIDIAKMMSRLAERLDCTTAALRETVKQRDALASLHQQDITKALDECAEYLDRDCIMETNGISYEVAAQRQAGAKALHDALMGHSRKELAA

SEQ ID NO: 1855 - protein, 181 aa, Kosakonia cowanii
MRMNAKELIADARVTAPTLPPAEAKLMTAMADRLDLQFVVLCESRNEAKQLAGENALMKSAIKTHSESVHFCVGCGKDDPCSNDDVCYALEETPATDAFLASLRAEARKQGAVFAANRMLAAWDAGFIEDTPENAADIARAILKSTEFMDEAPDGDFDRSFADEVLEAIAAQLRSKSEVQS

SEQ ID NO: 1856 - protein, 168 aa, Kosakonia cowanii
MRMNTKELIADARVTAATLPPAVAKLMTSMADRLDVQFVALCESRNEVKQLAGENAVMKSAIKTHSESVHFCVGCGKDDPCSNDDVCYALEETPATDAILASLRAEGVDMAMEAAKPEVANEFQRETFDQCVTAAVKYPQSDLAGKVEMVAWLELFAAQLRSKSEVQS

SEQ ID NO: 1857 - protein, 422 aa, Kosakonia cowanii
MIYTTGSIAVSGNTLTGTGTNFTAAGSLIRNGCTVLALTSPAQAFQISAINGATSLTVTPAASPAVPAGTKFAILLSDSLSVDGLAQDIAETFTMYQGYMSGFADVMKGVGDVTITINGEPVTVPGQKSLVKKGANSDITSLSGLTTALSIEQGGTGAKDAAGARKALQLGGAATLEVGTAAGTVAAGNDPRLTTLDGKSGGSITGRISMPAGAVGTYLSASQNAGVRQRVVNDTSATSAVGALTWGYNNGSGFQLDTTWGSVGLGASAWPYTFMMQTANETQFGARIWTFSMSSGDIICSGSGNQAGTFTFTKASNSDREIKHDIVYTDGQESYENVKKYSPTSFVYNDDQQSRKRRGVIAQDVQEIDPEYVRAILNPFTMKTSLSLDTNVMLLDVALALKVAISKIEALEETVQQLRYGS

SEQ ID NO: 1858 - protein, 422 aa, Kosakonia cowanii
MIYTTGSIAVSGNTLTGTGTNFTAAGSLIRNGSTVLALTSPAQAFQITAINGATSLTVTPAASPAVPAGTKFAILLSDSLSVDGLAQDIAETFTMYQRYMGGFADVMKGTGDVTITINGEPVTVPGQKSLVKKGANSDITSLSGLTTALSIEQGGTGANDASGARKALQLGGAATLEVGTAAGTVAAGNDPRLATLDGKSGGSISGRISMPSGAVGTYLSAAQNAGVRQRVVNDASATSAVGALTWGYNNGSGFQLDTTWGSVGLGASAWPYTFMMQTANETAFGARIWTFSMSSGDIICSGSGNQAGTFTFTKASNSDREIKHDIVYTDGQESYENVKKYSPTSFVYKDDQQGRKRRGVIAQDVQEIDPEYVRAILNPFTMKTSLSLDTNVMLLDVALALKVAISKIEALEQTIQQLRYGS

SEQ ID NO: 1859 - protein, 422 aa, Kosakonia cowanii
MIYTTGSIAVSGNTLTGTGTNFTAAGSLIRNGCTVLALTSPAQAFQITAINSATGLTVTPAASPAVPAGTKFAILLSDSLSVDGLAQDIAETFTMYQGYMSGFADVMKGTGDVTITINGEPVTVPGQTSLVKKGANSDITSLSGLTTALSVEQGGTGAKDAAGARKALQLGGAATLEVGTAAGTVAAGNDPRLATLDGKSGGSITGRISMPSGAVGTYLSAAQNAGVRQRVVNDASATSAVGALTWGYNNGSGFQLDTTWGSVGLGASAWPYTFMMQTANETSFGARIWTFSMSSGDIICSGSGNQAGTFTFTKASNSDREIKHDIVYTDGQESYENVKKYSPTSFVYNDDQQGRKRRGVIAQDVQEIDPEYVRAILNPFTMKTSLSLDTNVMLLDVALALKVAISKIEALEETVQQLRYGS

SEQ ID NO: 1860 - protein, 243 aa, Kosakonia cowanii
MNKTIMLAIRAHALEESPRECCGFVIQSGRRQRYIPVSNTHENPTEHFRIDGEFWANAEDIGTIIRVIHSHPGDGARPIPSDLDRQQCNNSGVVWGIYATDSGEYAEIMPEAVPLIGRPFILGSHDCWGLIMDWHATQGVTLDDFRVDYPWWESQYPDNFYFDNWEQEGFIECDPAPGCMVIMQVESDKWNHAGIITEEGELLHHLYGQLSCITPYARGYFKDRTMICVRHRSLPEEIKPWRV

SEQ ID NO: 1861 - protein, 236 aa, Kosakonia cowanii
MRDKTISAILAHAAQSFPAECCGVVIQKGRVEKYVACRNLAASPEEQFELSPEDYAAAEEQGTVVAVVHSHPGDGATTQPSELDMLMCDATEVPWVIASWPEGDIRTIMPRGDRPLTGRQFVLGHADCWSLIRDYFRIEHNIDLPDYSVDHHWWEEGENLYMDNWHDCGFREFDGPQQPGDMVIMQVQASVPNHAGILLEGNMLLHHLYGQLSQRIPYGGYYRDRTIKVLRYKDLM

SEQ ID NO: 1862 - protein, 236 aa, Kosakonia cowanii
MRQKTIDAILGHAATEYPRECCGVVAQKSRVERYFACRNLAAAPEDNFVLCPEDYATAEDWGTVIAIAHSHPDATTQPSELDKAQCDATLLPWHIVSWPDGDLRTIQPRGELPLLERPFVLGHFDCWGLVMSYFRQTHSIELHDYRVDYPWWENNYPDNFYQDCWYECGFREFDGPPKPGDMVIMQVQADKWNHAGILLEGNLLLHHLYGHLSQRVPYGGYWQERTMKILRYKSLC

SEQ ID NO: 1863 - protein, 116 aa, Kosakonia cowanii
MAVETYKWPAQLGAGAIEYNQTIRASQFGDGYEQVAENGINSTAIQVPMIYVGKEVLINEIRSFLLAHTIKAFIITPPGEEKGLYRVVKDSVRKNQISSNAAELTFTIKRAYGVYA

SEQ ID NO: 1864 - protein, 113 aa, Kosakonia cowanii
MMAIEEFTWCPRINAQQEVTFRTRTAQFGEGYKQVSGDGLNPRSQKWTMEFTGDEAYIAAIKAFLDRHGGTRSFSWRPPLEPLGLYRCNTYTPTPLGARKYNLSATFEQAFAP

SEQ ID NO: 1865 - protein, 1238 aa, Kosakonia cowanii
MSDIATISLRVNTAELERGNKALDDFQQTAGGAANKADDLNSVFRAGASDQKKNTQSLKEQQQELQNLLNKISPVNRAMDELETLQSKLAGFRGKGLLGNEDYSRFSAVLDTTRDKLFQVMEAETAEGQERLKLAQDTQRAAAAQDSFLNSLSEQAATFRASKSDVLEYRASILGLTQEAAPLIQQIRERELAIASEAMQTRIAAQELREKQAAERQALAEASRLQAQNDNFVESLRNQALAIGKSRAEVLELKAAQMGLLQEAGPYIAVLKAQEAATAQEAANKKVSAMQSRMLRDAIAELEAAERAEASEMQRAQNIRDSFVRTLEQQATSIGKTRVELLEMKAAQLGVSQQAAPFIEKLREQDEAWKKGGISAGQYRQALRMLPAQFTDIATSIAGGMPLWMVLIQQGGQISDSFGGLGGLFQFIKEEVLGFKEATDDSSESLSENANSLAENAEHGRGMLAFLTPARLAVGGLVGVASLLAIAWYKGAQEASEFNKQLILTGNYAGKTAGQLSQLSRQIADDAGVTIGESSATLAKIVGSGRFDGNKLEVVARAAAAMEDAVGQSVDTTIANFQKLYDSPVKASIELNSQLHYLTAAEFQYISALERRGDKEEAGQKAADSYSRAEQQRSQQVIDNLGLIDQVIRGVSDTWKAYWDAALGIGRKESTAEQLEVVRQRIKEITNQSRPGVFGMGNVGDGGAAKRELAALLQQERELGFVIKSQEGYNQKKAEFNKINQAGIDAQISFNKYLDAGTTQAEKRALAQKDLNKAIADNAKAVKATQGLPYEQRVKPLTPEQISKARAGIEKLYKDPKTPKAKGITVAAGDRAEDSAQAELLALQAQLKTLQDHRSVNDTISQQRKDLYATESKFAVLETAASTRQLSKQEKSLLASKNQVLQLAQQKALLGDQITAQEQLNKRMDTAQKYVTQMVEKQTGLASGATMSDRLAGRQASLSQLRSGWLNAGGGLNDDGYKRELKAANDYYAAEDKLRGDWMAGARKGWAEYLDAATNVYGSMQSVAQSALGGISDMLTNLVTTGTASFKSFAASMMKMIADVINRLLVAYTVQAAMGWISTGTSPAGSGAGQSFAVPSFRPAWNGGYIPEFDTGGYTGDGGKYQPKGVVHGGEFVFTKEATAAIGVNNLYAMMRGAQGYAEGGVVGRPPMLGLMSGSGNAAPVINTTVNVDANGNPSAQSSISGDAMGRAMAAEIQNAATLVVQRHLKPGGMIYNFTKGR

SEQ ID NO: 1866 - protein, 1163 aa, Kosakonia cowanii
MATLRELIIKISADSSSFQSEITRASRMGSDYYRTMQAGGRQAAAAAKESERALSDLTNGFASAGKAAAAATAAFATGKLVQIADEWNSVNARLQQASASADDFATSQRQLMEISQRTGTAFSDNANLFARAAASMREYGYSSEEVLKITEAVSTGLKLSGASTAEAGSVINQFSQALAQGVLRGEEFNTVNESGDRVIRALATGMGVARKDLKSMADQGKLTIDKVVPALMSQLGALQGEFATMPQTVSGSLQKVTNSFMGWVGGVNAATGATDALSGGLDGVAQTLDSFTSSAVSGALSDVADNMSVITTVAGALVGVGLAKYLSGIVTSATSATGALISAAKSEVALAVAQDRAAQSAVAASRADVYRAQQALQRAKGADVQAAQQEKIAAAEAKVTAAQSRLTTALAGGTATEKVRARAALERAQAGLAAAKNADVQAVAERRLAQAEAARDRNLANRVSTQSNLNSVTAVGSRLMSSALGVIGGIPGLVMLGAGAWYAAYQNQEQARRSAQEYGRTIDEISKKTRAMSLPEASDNSEKAKKALDEQNRLIDEQKSKIESLKEQIAGSQYLINNPGPTTKGGFMINHLTSLKTVTDDLSTATEQLSVEQERLSQMQEKAASIQQTLEGLQYRRVSLIREEAANQNSAYQSLLMMNGQHQTFNQLLGLGNQLLMARQGMTLAPLRVPQAEASQKQTEALEKSRRELALSRLKGEAKERARLGYAADELGLTADPQFQTNRLEYINNGLEEWRNNEANKKQPKGPKTDEEKAADAYKRMIKQQKEQIALQGQSTELARVKYQVVEGELSTLDKAQKAELMRNAALIDQVKLREQLRNYEANLADSNASARAANDAQLIGYGQGTRFRERMQEQFNIRKEFEQKNADLLRQRQAGDIDETFYQQGLALNKRYLEERLRDQEGYYTASDAQRGDWLTGMSEGYANWVEEATDYAGMAADGMKQAMGGAVTTITDMLNGNLDSWKDWGMNVLKIIETVLVNMMVANAASSLGSLFSFGASSAATASSGTAIQSAASNFTFNAKGNVYDSPSLSAYSGGVYQTPQLFAFAKGAGVFGEAGPEAIMPLTRAADGSLGVRAVGAPQFSGGGPSVSFGDININGGAQSTAGQGAAATAGRQLKDAIVTVINEQASMPGSPLWRLLKGA

SEQ ID NO: 1867 - protein, 1171 aa, Kosakonia cowanii
MATLRELIIKISANSQSFQTEIARASRMGQDYYRVMQNGGRQAAAAARESERALSDLTSGFASAGRAAAAATAAFATGKIVQIADEWTSVNARLRQASASSDDFANSQRRLMSISQATGTAFTDNANLFSRAAASMREFGYSSDEVLKVTEAVSTGLKLSGASTAEAGSVITQFSQALAQGVLRGEEFNAVNESGDRVIRALAAGMGVARKDLKSMADQGKLTIDVVVPAIISQLGKLQGEFAAMPQTVSGSVEKVANSFMAWVGGISQATGATDMLSGGLDGLAATLDSLTSSAVTGALNDVADNMATITTVAGALVGVGLAKYLGGIVTSATGATTSLIAAAKSEVALAVAQDRAAQSSVAAARADVYRAQQALQRAKSADVQAAQQERVAAAEAKVTAAQARLTAAQASGTATEKVKARSALERAQAALVAAKSTDAQAVAERRLAAAQTGLNNNIANRVTAQNNLNGVTSVGTRLLGGAMGLIGGIPGLVMLGAGAWYAMYQNQEQARQSAQEYAKTIDEVSQKTRAMTLPEAEDNRGKTVQALVEQNRLIDEQEKAIAAVKRQLDDLNKTRGQPGMTGDNDLNIVKAMGILTDQLTVEEDKLNQMREKSRGIQQALEAIERRRNDLIREHAWRQNAQYQSLLMMNGQYEDFNRLLGLGNQLLASRSQLIKAPFAIPQAPVSDNDKQALLQKQQTAELAGLTGLDKVNRQVDFELQKMGKTGPENSKFAAGWRQAAIDEYNKSQSLAAAQKAQAESTRDAGKAQREAAQTAEQYSRKIADLSVAIEVQKVRAKEGEQAAELYAAANQTGAKWTEEQRTAIRAQSAELARLTQLADDHVRKIREQADALKDLREASRKFSDEAAFAAETSGMGDRQKQRYEETQQVERVFSKTDQSTRAIHEREMALASLDKKYREIAASESNWRNGVSRGYNSWFDEMTNIAGTVSDGVKSSLDGAFSNVTAMLEGNKVSWKSWGISVLQIIEKVALQMAVVSAMGSVSSSSGLIGSLVGGVTSFFSGGGAGASPAGQSFAVPSFTPNALGGVYDSPSLSTYSNGIYNSPQFFAFAQGAGVFAEAGPEAIMPLTRASDGSLGVRAVGSGVNNVSTAAGAAPQVNVYITDSGNKSTATPGYEQLGREAGAFIDRRYRELIGRDLAPGGNIWNLARGNR

SEQ ID NO: 1868 - protein, 1107 aa, Kosakonia cowanii
METITGAKGGSQKQHTPVEQPDSAQSMARCRILLALGEGEFAGGLDATRIFLDGTPLGNADGTMNFENVTWDFRPGTQTQTPIPGFAAVENETSIGVSLTKVTPWTRALSNTQIDAVLVRIGIPGLQQQQNNGDIVGTTVKYHIDLAVDGGAFSTVMTRTVTEKLSSLYELTHRINLPKATTGWQIRVVRDTDDSTSQMLQNKTQVQAITEVIDARLRYPHTALLYVSFNAKSFSDIPKISCKPKGRIIRIPSNYDPVARAYSGTWDGTFKWGWSNNPAWIWFDVLTEPRFGLGRRITADMLDKWELYRIAQRCDQKVPDGKGGSGTEPRFMFDVYIQSQADAWQVIKDIAAGFNGMTFWGNNMFNVVSDMPADTSKLQILTRAAVIGKPVYSSGSEKTRFSSALINFSDPDNHYQDRTTAVMFPDLVKQFKFKQTQITAIGCTRESEAQRRGGWAVYSNSLDRIITLQTGLDGYVFVPGTVFAFADERLSGRVYGGRVAGYNGGLKAVTTDRGTSAVAGDTLMIRTQGGTVESRVIQAVNGTQLVVSTPFKADPLPNAVFVIDAGQLRLQYFRVTNLTFNDEENTYSITGAEYNSSKYDAVDNNARLDTPPISLIPTGLVNQPTNIQVSSFESVRQGQRITTLIASWDAPLDKNGRPQADVISYQVQWKRGDNEWINVPETGLRNIEVTGIFEGDYLVRVRAINSGGASSLWASSLLTHLKGRVGDVPKPVGLSASEDVVFGINITWGFPTDTADTLSTELQYSLAADGSNPMLLAAVPYPQKLYQQMGLKAGQEFWYRARLVDRTGNQSAYTDWIRGQSSSDVTDITEAVLEQIKDTGLFKDLIENAVEGSQAVADLAEAVKQNADGLAAAAGATRQTAEAIIGNALAIADVVVRQSAQQGANSARFEQLREVIATETEARVTDVIRLEAKTDQNTAGITEVRQALANETEARATAVDQLTAQTEENKASFTELTQTVTDLDSSTASRFEEISAEIAGIDGNEIRGGIQSNSIALITYTLAQVNTRTLLSVQYGDNKAGIQRVDNVMADASQAVAESLRTLDASAGGGTATATDFAKTMADFSQVSATRINSLSVTVNSQQAAIV

SEQ ID NO: 1869 - protein, 1147 aa, Kosakonia cowanii
MTNTAIKGRKGGSTKTRTPVEAPDSIQSIARAKILVALGEGEFAGGLDGRSIYLGDASSYTPLQNADGSFNFNNVKYEFRSGTQDQSYIQGFPGVENELQVAYELKAAVPYVRSVSNTQLSALRIRLGWPSLLNQKDNGDKVGTRVEYAIDLSADGGTYVTVVNGAVDDKTTTLYERSHRIDLPKATTGWQLRVRRITPDSTTVNIVDSMRVEAVTEIIDAKLRYPNTALLYIEFDAKQFPNGIPQVVCNPKGRIIRVPDTYDPDTRTYSGTWEGGFKWAWTDNPAWIYYDIVLNELFGLGKRIDATQIDKWELYRIAQYCDQLAPDGKGGSGMEPRFRCNVYIQERNDAWTVLRDLAGIFRGMTYWGDNKLYVLADMPRDIWHIYNHASVVNGKFTFADPSETTRNTAALVNWSDPANHYKDTPEVVYDNELAMRFDYSQLEMTAIGCTRQSEANRRGRWALLTNGIGEVVTFSTGMDVPPVGEVIGVAANELAGRVIGGRVSAVSGRNITLDRAADVKASNRLFLNLPSGAAQARTVQAVNGNIVTVTTAYSETPEAECCWGVDADDLFIALFRVTGTRDNDDGTFEVTGATYSPDIYAAVDTGARLDERPVSVIPPGVQAPPENIVIDSYSTISQNIAITTMRVAWNSVKGAIAYEAEWRRDSGNWVSVPRTSSLGFEVPGIYAGRYLVRVRAVNASDVSSIWATSAEVTLTGKVGNPPKPVGLTASETVVFGIELNWGFPANTDDTLQTEIQYSLTGSDGDAMLLADVPYPLRKYQQMGLKTGQVFWYRAQLVDRTGNESGYTDWVRGQSSSDVTDITEAVLAQIKDTDLFKDLIENAVDSSAKVAELAEAVRQNADGLAAAAGANRQTAEAIIGNALAIADMVVRQSAQQGANSARFEQLREVIATETGARVTDVIRLEAKTDQNAAGITEVRQTLANETEARATAVDQLTAQTEENKASVTELTQTVTDLDSSTASRFEEISAEIAGIDGSDIRGGIQSNSIALMTNTLAQVSLSNRMSVQYGANAASIQRVDTVMADASQAVAESLRTLDASAGGGTANATDFAKTMADFSQVSATRINSLSVTVNGQQAAIVQNAQVSADINNNLNAMYSIKVGVDANGRQYAAGMGIGVQNSSSGMQS

SEQ ID NO: 1870 - protein, 1252 aa, Kosakonia cowanii
MAHATVIRGSKGGGSKSRTPTEQPDDLQSVAKAKILIALGEGEFSGQLTGKDIYLDGTAIENADGTQNFSGVTWEFRPGTQAQNYIQGIPGTENEINVGTEVSSAVAWTRTFTNTQLSAVRLRLKWPSLFKQEDDGDLVGYSVNYAIDLQTDGGTWQTILNTSVTGKTTSGYERSHRIDLPQAGSTWTIRLRKITPDASSAKIGDTMTLQSFTEVIDAKLRYPNTALLYIEFDSSQFNGSIPQISCEPRGRVIRVPDTYDPETRAYSGIWQGAFKWAWTDNPAWIFYDLVVTDRFGLGQRLTAANIDKWTLYQIAQYCDQQVPDGKGGSGTEPRYTCNVYIQDRNEAYTVLRDFAAIFRGMTYWGGDQIVALADMPRDVDYSYTRANVVGGRFAYSSSTTKSRYTTALVSWSDPGNAYADAMEPVFEQALVARYGFNQLEMTAIGCTRQSEANRKGRWGILTNNKDRVVSFDVGLDGNIPQPGYIIAVADEMLSGKVMGGRISAVNGRVITLDRKPDAVAGGRLILNLPSGASQIRTIQAVNGNSVTVMTAYSETPEPEAVWVVESDELYAQQYRVVSVSDNDDGTFSVSGAWHDPDKYARIDTGAVIDQRPVSVIPPGNQALPANIAISSFSVVQQNISVETMRVSWDQAQNAIAYEAQWRRNDGNWVNVPRNSTTSFDVPGIYAGRYLVRVRAINAAEISSGWGYSEEKTLTGKVGNPPKPVGFTASETVVFGIELNWGFPANTDDTLKTEIQYSLTGTDDDAMLLADVPYPLRKYQQMGLKAGQVFWYRAQLVDRTGNESGYTDWIRGQSSSDVTDITEAVLEQIKGTDLFKDLIENAVEGSQAVADLAEAVKQNADGLAAAAGANRQTAEAIIGNALAIADVVVRQSAQQGANSAKFEQLREVIATETGARVTDVIRLEAKTDQNAAGITEVRQALSNESEARASAVDELTAKTEKNAANVTVLTQTVTDLDSSTASRFEEISAEIAGIDGSDIRGGIQSNSIALITNTLAQVNTRNLLSVQYGDNKAGIQRVDNVMADASQAVAESLRTLDASAGGGTANATDFAKTMADFSQVSATKINSLSVTVNGQQAAIVQNSQAVADISGNLSAMYSIKVAVDAAGRQYAAGMGIGVQNSPSGMQSQVLFLADRFAVMSQAGGTVSLPFVVQNGQAIINEAFMNYASLTLARVGSWYSANYVAGQTGTIMKADGTFEVNGAVSGQGRMQITNNRIISYDAQNRPAAVMGQRL

SEQ ID NO: 1871 - protein, 257 aa, Kosakonia cowanii
MTALIDTAAMLAPGGKVRLVEVDASEFSGGIHRFHYSPFPHTPREIDEAQGDESKLGPKPVVFDGEVYDFWPFQLTGLALSTDQAAEPSLSVSNLDGHISALCLQFKDMVNAKVSIIDTYTVYLDAVNFPDHVNPSADPTMFTLQTFWLDTKTSEDDEVVTWGLSSPADLQGLVIPTRQITSLCEWALRGQYRSGDGCTYNGTAYFDAKGNPVADPALDVCGGCLSDCRKRFGAGLAEPNAAILDFGGFPATVLFTR

SEQ ID NO: 1872 - protein, 252 aa, Kosakonia cowanii
MSISSDVQKLEPGSRVRLIEVDGEAFGAGILRFHNETIPHTEAEITAAGGDASKLPPKSVWWQGLEYGAWPFELTGLSVSSDGQSARPTLTVANISGTIGALCRRFQGMAKAKVIIHETFAHYLDARNFASGNPGANPTEERKQVYYIDRKSSSDDETVEFELSSPADLRGQLIPTRQIQPMCTWCMRGWYKTGNGCTYAGQNGWFDKDGNPVDDPSKDVCSGLLSTGCKPRFGANNELDYGGFPGASLLRG

SEQ ID NO: 1873 - protein, 251 aa, Kosakonia cowanii
MSLNSDYQKLEPGDEVRLFEVDGTSFGTGEVLRFHSYSLAHTEAEIAAAGGNENKLPAKSVWWQGEEYKAWPCRIEGIEASTSGSSAQPKLSVANLDSSITALCLAYDDLLQAKVTIHDTLGKYLDAKNFDGGNLSADPTQEKLKVFYIDAKSSETNEVVEFTLSSPMDLQGLMIPTRQLHSLCTWCIRNKYRTGDGCDYAGTRYFDKNNNPVSDPSLDECNGTLTACKLRFGENNELSFGGFPGTSLIRS

SEQ ID NO: 1874 - protein, 199 aa, Kosakonia cowanii
MARLTTIRLYGALGARFGRVHKLAVQTSAEAVKALCINFDGLEDYLMSAKKNGMTFAVFRGKRNIGVQDFQGLAGKNDIRIAPVMEGAKKAGMFQTILGAVMVVAGIIVGVATGWTGVGLTFGAGLIMSGASMMAGGIYQMLSPQPKGLQGRDDPDNKPSYAFGGSVNTLAMGNPVAPLWGEREIGGAIISAGIVAEDI

SEQ ID NO: 1875 - protein, 199 aa, Kosakonia cowanii
MEKRTVIKLSGSMAQRFGRTHRRVLSSASEVFRALSSTVDGFDDYLREARARGLDFVIFRDRRNISQEEFSLLGPGDELRIIPVIRGSKRAGIFQAVLGVALIAGGIALGPAGAGLIGKGAALNIALVGASMSLGGVVQLLSPQVAGLRMRQDPDNKPSYAFGGPVNTTASGNPVPLLYGQREIGGAIISAGIYAEDQQ

SEQ ID NO: 1876 - protein, 267 aa, Kosakonia cowanii
MKLESSLKHFSPQGMNISDSVKGTSPDRLTGTDVMAAIGTTSSRARFGLAAFFGKAGISKTDEQIAVQALVRHSMEVAPKNVRKAAGGEFGWCMQVLAQFAFAEYARSAASSSTCTTCSGTGFFSRIEDVIKHPGILDSDGVELVAPKIKHEQVKHACTACGGKGIIPARCRCGGKGEVLDRVATKERGAPVFKTCERCSGNGFSSVPSTAAHKAITRRLPDLHVRTWTRNWKPFLESLVGVCQQEEAKAEKEFQSATSFHDEGNKI

SEQ ID NO: 1877 - protein, 197 aa, Kosakonia cowanii
MGIQDPAPAINGLMQYALALKNPVLGKLSEKARGEVLPVLVQFAYADYSRSAASKSTCPHCEGKGVVREMQDVVKHPGVNGIEATVKHEAVEVMRQHCAGKGEVGTACRGCKGKGTVLDEKRTKLLGAPVRKVCGRCNGNRFSRLPTTLARARIEKIIPDLTSYQWYKGYGDIIALLVTKCWQEEAFAELQLQKVTR

SEQ ID NO: 1878 - protein, 360 aa, Kosakonia cowanii
MQRPARYDANLPRNLTFRKRDKLYSWRNPITGQVIYLGRIDRREAIAQAIEANSYLDQNYIPSSLLQRIKETPTLTMAKWLERYDVILERRELKPNTMKVRRNQMETIRKEFGTIALSAVTTKDIAEFLETYIACDKKSMAAGLRSVLLDVFREALVEGHIERNPAEPTRTPAPKVKRERLMLEAYFTIRETAAANSVWAANAFDLALVTAQRREDIAMMKFTDIREDRLFVIQEKTGNKLAIPLDLKLEAANLHLKEVIERCRVNNPSEFLLYSPVRRGGRKPGPLTPDGLTQAFSDTRDITVLKFGPYPPSFHEIRSLASRLYEKEKGEEFAQRLLGHKNLSMTKKYLDSRGAEYVRV

SEQ ID NO: 1879 - protein, 381 aa, Kosakonia cowanii
MAARPRSHKISVPNLYCKLDKRTGKIYWQYKHPLSGRFHSLGTDEAEAKQVATEANMIIAEQRTRQILSVNDRLARMKGKRTDITVTEWLDKYMAIQEERLKHNELRPNSFKQKNKPVRLFREHCGLQHLKDITTLDIAEITDAIKAEGHNRMAQVVRLVLIDVFKEAQHSGHVPPGYNPAQATKQPRNKVTRQRLSLDEWKKIYTSAEQQEPYLQCGMLLALITGQRLGDICNMQFKDIWDDMLHVEQEKTGSRLAIPLDLKCDVLGLTLRDVISKCRDAVISKYLVHFRHTSAQATRGDKVSTSSLTTTFRKARDKSGLNWDKGTAPTFHEQRSLSERLYREQGVDTQKLLGHKTQKMTDRYNDDRGKDWVVVSAKTGS

SEQ ID NO: 1880 - protein, 83 aa, Kosakonia cowanii
MKIINAAAVVLFSILATGCASNTPPLCYNGAVVMKNRVSVPVFGIRKPVSTPEYLSGGSFGYQWVERSAFTDTSTCDRLPLTE

SEQ ID NO: 1881 - protein, 80 aa, Kosakonia cowanii
MKIINAAAVVVFSILATGCASNTPPLCYNGAVVMKNRVSVPVFGIRKPVSTTEYLSGGSFGYQWVERSAFTDTSSCDRLP

SEQ ID NO: 1882 - protein, 317 aa, Kosakonia cowanii
MQMFIAGTSFDAINAMAASYVLDVITITGAGSKTYSLAGVELTYAIVNDFMGGQFTGATYSVSVSGLTVSWNVNNAVTLIVYGSPVAGTQSDYFGFQLFQYLNGVRTVKLAPNYVPFCLREIIDVPAGARTVQTQVPAGNPVMCFHRHTGAAMDISWWKPATANGYHALQFPTDGSNQTGCRVYVFSNILANIPDYGFYLYRDGQMVWHSNCLPLQVIPLTNGDITSDTPLAVSSSVTAHIFVPQDPAYPTGYSNFMCASAGNDGTRYKVQVGKVFQSTFISSPDEGRRMRGWASGGVGYIETQFYDQYYKYALGLA

SEQ ID NO: 1883 - protein, 317 aa, Kosakonia cowanii
MQMFIAGTSFDAINAMAASYVLDVITITGTGSKTYSLPGVELTYAIVNDFMGGQLTGATYSVSVSGLTVSWNVNNAVTLIVYGSPVAGTQSDYFGFQLFQYLNGVRTVKLAPNYVPLCLREIIDVPAGARTVQTQVPAGNPVMCFHRHTGAEMDICWWKPATANGYHALQFPTDGSNQTGCRVYVFSDILTNIPDHGFYLYRDGQMVWHSNCLPLQVIPLTNGDITSDTPLAVSSSVTAHIFVPQDPAYPTGYSNFMCASAGNDGTRYKVQVGKVFQSTYISNPDEGRRMRGWACGGVGYIETQFYDQYYRYALGLA

SEQ ID NO: 1884 - protein, 317 aa, Kosakonia cowanii
MQMFIAGTSFDAINAMAASYVLDVITITGTGSKTYSLPGVELTYAIVNDFMGGQLTGATYSVSVSGLTVSWNVNNAVTLIVYGSPVAGTQSDYFGFQLFQYLNGVRTVKLAPNYVPLCLREIIDVPAGARTVQTQVPAGNPIMCFHRHTGAAMDISWWKPATANGYHALQFPTDGSNQTGCRVYVFSNILANIPDYGFYLYRDGQMVWHSNCLPLQVNPLTNGDITSDTPLAVSSSVTAHIFVPQDPAYPTGYSNFMCASAGNDGTRYKVQVGKVFQSTFISSPDEGRRMRGWACGGVGYIETQFYDQYYKYALGLA

SEQ ID NO: 1885 - protein, 119 aa, Kosakonia cowanii
MKRMPDKDAGFWAGLIAWLYSHKTEWGYAGVAGMFSLLRSAYAQSSWSKRVLDAVSCSALAFFAAPTLQVVGGVLNWNVPDTAAQVLAVYIGYVGNDYISEKLRGWISRRTGDNSENQS

SEQ ID NO: 1886 - protein, 335 aa, Kosakonia cowanii
MAKPDWGDLQRRFLSEHAKSGVSPKEWCEAQGLNYSSARRYIKKHAAQSAQKSAQKKVRNAQKEKDVNALVENDGLTAQQRIFVAEYLKDRNATQAAIRAGYSAKTAEQIGYQLLQKTSVAVAIEKQQKASLMRTLASADEVLAQMWQLATFDANELSQYRRGACRYCHGFGHNYQWRDMVEFEEHRLKAIEKKGKEPVDVGGYGYDHNREPNPACPRCNGDGIGQPYFADTRKLPPVSRLAYSGIKLGKNGVEITAISRERMYEAVMKRLGLADSEFAQQLQQIEIERRQLEVERLRKELAADPEDEVPMPVAININVADARVRKDDDGDIADP

SEQ ID NO: 1887 - protein, 150 aa, Kosakonia cowanii
MNLINLIKNYSHVIVIGLICVALWGLNTRNAQLTATNERLEKLANSKDDQINDLRSKNDGLAASVGELVTAVRQQNEVMSQVTEQRAVTAQQNRKLQNEIKQYLEADKCAQSRVPDNAADRLRAAAKAAGGVPDNKPPANQPAGRTDIPH

SEQ ID NO: 1888 - protein, 150 aa, Kosakonia cowanii
MNPINFIKNYSHIIVIGLICVALWGLNARNAQLTATNERLEKLANSKDDQINDLRSKNDGLAASAGELVTAVRQQNEVMSQVTEQRAVTAQQNRKLQNEIKQYLETDKCAQSRVPDNAADRLRAAAKAAGGVPNNKPAANQPSGRADLPH

SEQ ID NO: 1889 - protein, 358 aa, Kosakonia cowanii
MQNTNVALADQNTVVNSNIALFDSQYLNAISTFAQIMAQGAATVPKHLQGNQADCMAVAMQAAQWQMNPFAVAQKTHLINGVLGYEAQLVNAVISRSGVLANRFEYEWYGPWEKVVGKFHIRKGEKGEYRVPGWTMADEAGIGIIIRATLKGEDHPRELDLLLAQARTRNSTLWADDPRQQLAYLAVKRWARLFCPDVILGVYTPDELEDRQEKEINPAPQQRVSVADIPAESTTNSAQESGTNIDGMADEFRDRIEAAQSVDKAKAVRVDIEAAKPTLGSALFTELKNKAVRRYYLVDARNKVEAAINSLPQPDEPDAAEQFTKAEQALAAAKRHLGDELYDQFAVTLLDMKPEYVA

SEQ ID NO: 1890 - protein, 212 aa, Kosakonia cowanii
MAKQGVGSNMTKKPRRKCANLSCRQWFNPVREGQVVCSFECASAIGKEQTAKAREAAKQKELQRQRAEEKAGRQRRAARRKELKPIRHWVQMTQRAFNDWRREMLLAAGHACISCGTKTAFAWHAGHYRTTAAAPQLRFNPDNIWLQCSACNVHKSGNIEAYRVALVGLIGEKRVLTLESNNETHRYTREELDGIRAKARAELRVLKQQEAA

SEQ ID NO: 1891 - protein, 1131 aa, Kosakonia cowanii
MEFFYLIKATQKSGKPDGVIWFSAKTEARAALTLDVKLEDTGIETGRGKDYAKPIRTDFPVVNDLPGEGVVDFTWCDRYQLADDQRTWNVIPGAGPQDETDLSPASTINDADLHATPVTSMDTVDAGNTSQLENRTPSVRFAVHLLGDKYHSEISQEQQIVANELAMDEANVYFQNLLQAKNEVPDMSELSLHAEWKLVQAVKDVFPQHKEHEPALLAAFMSSWVKAEIGERAQLVENWLSGKLPAPQLADTSEPGDDAPVSNAEAQQDATPEEVAQAHVQAFRDRDITELHAVPKLSFRHRLLAQFITEKEYAYHIDNEQLNTVRQLEMDTDNSYVQNLLLAAENVEGMKKLRDFEFWRLTDAVKRVFPSDKATPDLSLMLQFMKAWKTTDYIDRGLLAKEWINGNRVSTIHRTDTGTNAGSGIKTDRNADYEHTLDTLDIEIACATLPMDFDIYNIPGSIHRRAKDIVAAKESPWKEWSAALRKTAGILDYSRAAIFALIREASSGITTFPDRMTGYISATLNEYKHDTPEARILAAARQIDSAAVDAGVIQGTEPSHQLVAPPQPEVSNLGGGMFSIDCLLDEKATPVINTPSNEVAKQEVEIVCSVQMEETDPSKVEAGNPLPAVEVANEAAAQTISVSPADILAAATPELTRNVVPDLDQNIDALSQDEPELPPTEPEMTEIEPVADISEPEAAAKEWPAYFEPGRYEGLPNDVYHAANGISSTQVKDARVSLMYFEARHVSRTIQKERSKVLDMGNLVHALALQPETLAAEFSIEPEIPEGALTTTATIRECIDEYNASLPPQLSADDIKALLEAHNATLPAPLPLGAAVDETAESYMELPEEFQRIESDKKQTAAAMKACIKEYNATLPASVKTSGTRDALLEQLAIINPDLVAQEAQKPSPLKVSGTKTDLIQALKAVRPDAVFADELLDAWRENPEAKVLVTCQQLETALAIQKALHAHPTAGKLLQHPDRAIETSYFGIDEETGLEIRVRPDLELDVDGVRIGADLKTISMWNIKQSGLRAKLHREIIDRDYHLSAGMYMETASLDQFFWIFVNKDEGYHWIAIVEASQELVELGILEYRATMRAIANAFDTGEWPAPITTDYTDELTEYDLRRLEALRAA

SEQ ID NO: 1892 - protein, 225 aa, Kosakonia cowanii
MGFALPNGATVFVGSKLGTPVAVTSVSNAAGAVFTVASGHGLAVGDVVLVSSGWALIDSLVARVTAQTTTSVTIGVINSTDTNFFPAGSGTGSLSKVAEWTEIPQITEVSQSGGDQQYTQIQFLADDRQRNLATYKAAKSQTFTVAHDSTLPIYAVLSAADRSGDTLPLRMYVPKAKETRYWSGKPSFDPQPTTAPNAVETVQPAFAIQSRDITFYKDTAPQAAA

SEQ ID NO: 1893 - protein, 202 aa, Kosakonia cowanii
MADNQAFMVSINAFVSQAKERQEKVVRVVGIKILARLVQMSPVGNPELWAVNQTAAAYNAAVSEHNSLLRQNPDNLTKAGRLRPGRKVKDGMDIKAPPGYTGGRFRGNWQVSFDQRAVGETGRIDKAGHETLTAGNLVLEQFKVGTTAIYFCNNVPYAYRLEMGHSSQAPGGMVRITAAEFQRYFSEAVSEVKNDTGHHNGA

SEQ ID NO: 1894 - protein, 160 aa, Kosakonia cowanii
MIITDITSPAMNSYAGEGDLKGFADLRDITLPEKLAPLLIRAMDYLEGLDWAGWRSEPKQPLAWPRAGIELDGYELPAGEVPRQVVTAQCMLAVEAMDGDLLGSVREAAVKSERVEGAVTTTYAVADGEVFRPSYPAVMALLGELAAGRGYAVNAFAERA

SEQ ID NO: 1895 - protein, 229 aa, Kosakonia cowanii
MNHELFHAVQSRDVEMLARMAGSSREQTKVINSDAERMVDLLFSQLKQVFPASTQTNLRSEADERTAKQQWIATFAENGIRSREQLVAGMKKARASVSPFWPSPGQFVAWCREGKGLLGVSPADVMTEFWKWRKLVFKYPTSEQYPWPQPLLYHVCLELRRRGVDRQMNEKELLSEAGHLLAHWEKRVAEGKPIPPVRRALAAPNEDRGPTPAEMLMAEYKRRQAQGRV

SEQ ID NO: 1896 - protein, 103 aa, Kosakonia cowanii
MATKFQLQPKPTFKADVTIPRAGEDDGVLTFTFRHKPVKELAALEEIEGKTAIDFLTEITESWALPDEFSRENLEMLLDNYPGAMKAIVGTYYRELTGNREKN

SEQ ID NO: 1897 - protein, 136 aa, Kosakonia cowanii
MIPDITTALEAMLGLWADGEGVRVAWDNIQFDPPVDGLYLISHDMPAQPYSIDMAGGCQVYPGVYQVTVVAPAGGGKSQARVLAHRVAGLFPENQEIPGDGFTAWVTSPPAIYPGIPDGVSYSIPVSINYRADISA

SEQ ID NO: 1898 - protein, 116 aa, Kosakonia cowanii
MPVNYTRMKATSTRLLTENGAAYPVKRKGTVTVIGGVEHREPDKTFTAIGVRTEYRPGEIDGTVIINGDTRIVFTADTELRTGDMVDVDGRWYRIEKPNPVNPGKLLLCYRAQLRA

SEQ ID NO: 1899 - protein, 256 aa, Kosakonia cowanii
MLIRNMLLKYYAPEDDGQGGGGGGTEITPEIQKLIDDQVAAQVSGLKTKNSELLGTIKQQKDNLSRFDGIDPDAVRGILQRFSDDEEAKLIAAGKIDEVLDKRTERLRADVDKQIKAANERADKAEAFSGKFRDRVLGDAIRAAASKAGALAEASDDLILRAKGTFQLNDEGEAVAVDANGDVLFGKDGKTPLSPLEWAESLKETAPHLFPRAEGTGAGGHKPGGGGSQKRSEMSASDKADYIRKHGQQAFLKLPK

SEQ ID NO: 1900 - protein, 468 aa, Kosakonia cowanii
MANNDITWVRPEHRAASAAWKKIRDFCKGAEAVKEPGNNYLPLLDSTDKSMRNRKRNEDYLQRAVFYAITGNTKIGLLGLAFRKDPTFSAPEKLSYLLKNADGAGTSIYQQSQLVTENVLEVARDGLYVDYAEGSGQAIILRYLAENIINWRTKRINGRDQLVLVVLRECVEQEDGYAFKDEVQYRELALEEGRFICRVWRRSADAGSAAYVVTSEYQPKPKGKDSWDEIPFTFVGAQNNDPTIDDSPLAALVEINHGHFRNSADYEDSVWFCGQVQPYMTGLDEGWRDHLEKKGVKIGSRSPLLLPREGNFGYAQAQPNMLAKEAMDSKRDYMVQLGARLIEQNAAVKTATQSSSEQTSSTSVLGICVSNVSEAYSLAIGWCAKYLGVGEQQAAYAINQEFIAKVAESGMVTAIVNAWQSGAIRDTDMIRALQKLDLINPADSSDDIIDELHNPTPTLIGGNNGNGK

SEQ ID NO: 1901 - protein, 277 aa, Kosakonia cowanii
MADLSNGYTKVANEIQQLKPRLRLSGREWQCFEAVIWLTYGWNKKQDRVTNTVIAELTGLSDSHVSDALKSLAERKIIFSHKQGVMKTVGINTDLSAWILDKPKAGKLFPKTGNTFPETVATQDYNNNNIKRSSSKNSGESSDDRLKAFLSAHPDAVIYTPNFTKWGTAADQQCAEWILALLEKVKPFPKKPVLAAWANDVRLMRDLDGRSHREICELLQWASKDTFWHTNILSPAKLRAKWDTLSLQREAAIRKTTSDAPASDAHWNSPEAWKDFI

SEQ ID NO: 1902 - protein, 317 aa, Kosakonia cowanii
MATTVNNDLVIYDDLAQAAFLERRQDNLEVFNTSSNGAILLDNELIEGDFRKRAFYKVGGSIESRDVNSTGKVNGKKIGAGEAVSVKAPWKYGPYETTEEAFKRRGRTVDEFSEVIGVDVADATLEGYVKYGLKALTAAIGANTDMVVTADIETDGKKTLTRGLRKYGDKFNRVVLFVMHSATYFDIVDEAIASKIYEEAGVVVYGGQPGTLGKPVLVTDTMDAAAILGLVAGAVTVTESQAPGFRSYDINDQENLAVGYRAEGTVNVELLGYSWDTAKGENPDLTAIGTAGNWKKHFTSNKSTAGVLIKLGAASGE

SEQ ID NO: 1903 - protein, 198 aa, Kosakonia cowanii
MAQLQLIKHSSNILIPATPETSDFLLSKCKLGAVLVADFKQVRNPAFHRRFFALLNLGFEYWEPTGGAISSNERRLVTGYAKYLASFGGSETALLDAAEQYLDRIADKRTGSISACKSFDAYRAWVTIESGHYDAIQLPDGTLRKHPRSIAFANMDETEFQQLYKAALDVLWRWILSRAFRDQREAENAAAQLLSFGG

SEQ ID NO: 1904 - protein, 79 aa, Kosakonia cowanii
MKESQDQGDWYDIVRRSDGKLVGSMPLESRNIVYIKNGMVSCRPLMEDEGIFNLSSGTRFLRRLGYRLEQPSDMMISTD

SEQ ID NO: 1905 - protein, 361 aa, Kosakonia cowanii
MATVNEILRDEAIAHTVWISRYSTGVANRMVKLLNDSDADLTARLLLAMDSLPTSQFTVSRLESMLGSVRELNQQAIAGMQTSLADELLLLAGHEAGYQLSLFDSLLPQRVKERYPLQSITPEQLYAAAMAQPFQGRLLSEWADNLEADRMARVVNAVRRGYLQGDTTETIARQVRGIASKGYKDGALQLSRTNAASITKTAVNHLAATARTNFAEANGDVLKGKQWLSTLDNKTTPTCIIRDRLRYTLDNKPVGHKVPYLQGPGKIHFCCRSTETLITKSWRELGIDSNELDEDTRASMDGQVPADTTYLDWLARQSLPRQDEILGPERAALYRAGELKLGEMFTDKGEWISLARLKALS

SEQ ID NO: 1906 - protein, 68 aa, Kosakonia cowanii
MKETWFYHMECTTEQAEELLAQYRRRGVKVERSLNPDFVTWTVSALLPEGNHPPRPSRVWQSKAWGRT

SEQ ID NO: 1907 - protein, 107 aa, Kosakonia cowanii
MCNHLKPKQKAIVEFIETNGPATPRQIRKLLCCDIREAYDRLKRLGMAGIVKNIGKPKHPEYQLVQRWQEKIKQPKPRRPAAPSAADVCRQNWQGYEIHKIFGSARA

SEQ ID NO: 1908 - protein, 69 aa, Kosakonia cowanii
MTGIENAIIRSGSASALGALIGVSKMAVSLWRRKGIPAERVLSVFEATGVTPHELRPDLYPNPTDGLPK

SEQ ID NO: 1909 - protein, 160 aa, Kosakonia cowanii
MSKVKHQFTIESTRACLPTGKAIVYNPCMNKKDPNQSLISRLTELNGKGFSKTEMAKVANVSKQAVTGWFRTGKMSKESALAVADAAGVSVPWLLGEDVGEKDGLKPDEQRLLELYRQLPEEEQKNMLRIFAIRLKELDELYEKYMSRRIKGDKPESNTN

SEQ ID NO: 1910 - protein, 189 aa, Kosakonia cowanii
MQTRIFNHDSSPAPGRVTSKYQELPRHSCKLSNIRKAVKAWNRATPGDAQNYISQLVAKEWFASGGRGLLLAGSVHGTKVNFFRMINNAGPKYDKYLEMLTPAIVAVMARDNEAIAREFGLVTGKTNEELIADAIKECGEAHQAKLLGQPIQRLEKEVREAAEALMRFLPTDSLGPVLASLAAMVPGVM

SEQ ID NO: 1911 - protein, 163 aa, Kosakonia cowanii
MRLNAKELIAEARATAPTLPPAAAKLMTAMADRLDVQFAALCESRNEAKQLAGENALMKSAIKTHSESVHFCVGCGKDDPCSNDDVCYALEETPATDAFLASLRAEGVEMAIGAVLNVDTVASTGALKFVFHQFAAQLRNKTEPSPETAAIARQFEQLKGDEK

SEQ ID NO: 1912 - protein, 421 aa, Kosakonia cowanii
MIYTTGSIAVSGNTLTGTGTNFTAAGSLIRNGCTVLALTSPAQAFHITSVDSATGLTVSPAASPAIPAGTKFAILLSDSLSVDGLAQDIAETFSMYQRYMGGFADVMNGSGDVTITINGQPVTVPGQKSLAKKGANADITSLNGLTTAITLAQGGTGAKTAAGARTSLGLGSMATQSSDAVNITGGSGTFTSLSSDAVTITGGTASLGTIETKAGAEQPLVIRTAPSGLGYIRFRDASENPLAYLGFGSSGAQHLILASNIGGNNVTLNTTGAVTVKAGGANYAFQTNGTATGQLWQSTSDVRIKKDIKPITNAREVISAITGYTFKKRYNLYDVAEPLYTEEAGILAQELELVAPEAVSKNDFGAHDLENNPIDDLRAVNYAGITPYLIELAKLHEAEISDLKEEVAQLKALVSSLAQGY

SEQ ID NO: 1913 - protein, 236 aa, Kosakonia cowanii
MRDKTISAILAHAAQSFPAECCGVVIQKGRVEKYVACRNLATSPEEQFELSPEDYAAAEEQGTVVAVVHSHPGDGATTQPSELDMLMCDATEVPWVIASWPEGDIRTIMPRGDRPLTGRQFVLGHADCWSLIRDYFRTEHDIELPDYSVDRHWWEEDENLYMDNWHDCGFREFDGPQQPGDMVIMQVQSSVPNHAGVLLEGNMLLHHLYGQLSQRIPYGGYYRDRTIKVLRYKDLM

SEQ ID NO: 1914 - protein, 112 aa, Kosakonia cowanii
MAVETFSWCPKVAAQADTSFRTRKAQFGDNYAQVAGDGINPVTPQWSVSFTGDEAYVQAIKAFLKRHAGWKSFIWKPPLEPAGLWRSESLQIATHGNDKYTLSTTFIQAYHP

SEQ ID NO: 1915 - protein, 1163 aa, Kosakonia cowanii
MATLRELIIKISADSSSFQSEITRASRMGSDYYRTMQAGGRQAAAAAKESERALSDLTNGFASAGKAAAAATAAFATGKLVQIADEWNSVNARLQQASASADDFATSQRQLMEISQRTGTAFSDNANLFARAAASMREYGYSSEEVLKITEAVSTGLKLSGASTQESSSVITQFSQALAQGVLRGEEFNAVNESGDRVIRALATGMGVARKDLKSMADQGKLTIDKVVPALMSQLGALQGEFATMPQTVSGSLQKVTNSFMGWVGGVNAATGATDALSGGLDGVAQTLDSFTSSAVSGALSDVADNMSVITTVAGALVGVGLAKYLSGIVTSATSATGALISAAKSEVALAVAQDRAAQSAVASSRADVYRAQQALQRAKGADIQAAQQEKIAAAEAKVTAAQARLTTALAGGTATEKVRARAALERAHAGLAAAKNADVQAVAERRLAQAEAARDRNLANRVSTQSNLNSVTAVGSRLMSSALGIIGGIPGLVMLGAGAWYAAYQNQEQARRSAQEYGRTIDEISKKTREMSLPEASDNSEKAKKALDEQNRLIDEQKSKIESLKEQIAGSQYLINNPGPTTKGGFMINHLTSLKTVTDDLSTATEQLSVEQERLSQMQEKAASIQQTLEGLQYRRVSLIREEAANQNSAYQSLLMMNGQHEKFNQLLGLGNQLLMARQGMTQAPLRVPQAEASQKQTEALEKSRRELALSRLKGEAKERARLGYAADELGLTADPQFQTNRLEYINNGLEEWRNNEANKKQPKGPKTDEEKAADAYKRMIKQQKEQIALQGQSTELARVKYQVVEGELSTLDKAQKAELMRNAALIDQVKLREQLRNYEANLADSNASARAANDAQLIGYGQGTRFRERMQEQFNIRKEFEQKNTDLLRQRQAGDIDETFYQQGLVLNRRYLEERLRDQEGYYTASDAQRGDWLTGMSEGYANWVDEATDYAGMAADGMKQAMGGAVTTITDMLNGNLDSWKDWGMNVLKIIETVLVNMMVANAASSLGSLFSFGASSAATASSGTAIQSAASNFTFNAAGGVYDSPSLSAYSNGIYQTPQLFAFAKGAGVFGEAGPEAIMPLTRAPNGDLAVRAVGMPQFSGGGPSVSFGDINIQGGAQSTAGQGAAASAGRQLKDAIVTVINEQASMPGSPLWRLLKGA

SEQ ID NO: 1916 - protein, 1253 aa, Kosakonia cowanii
MTNTAIKGRKGGGTKTRTPVEAPDSIQSIARAKILVALGEGEFAGGLDGRSIYLGDASSYTPLQNADGSYNFNNVKYEFRSGTQDQTYIQGFPGVENELQVAYELKAAVPYVRSVSNTQLSALRIRLGWPSLLNQKDNGDKVGTRVEYAIELSVDGGAYAPVVKGAVDDKTTTLYERSHRIDLPKATTGWQLRVRRITPDSTTVNVVDSMRVEAVTEIIDAKLRYPNTALLYIEFDAKQFPNGIPQVVCNPKGRIIRVPDTYDPETRTYSGTWEGGFKWAWTDNPAWIYYDIVLNERFGLGQRIDATQIDKWELYRIAQYCDQPVPDGKGGSGKEPRFRCNVYIQERNDAWTVLRDLAGIFRGMTYWGDNKLYVLADMPRDVAHIYNHASVVDGKFTFADPSETTRNTAALVNWSDPANHYKDTPEVVYDNDLAMRFDYSQLEMTAIGCTRQSEANRRGRWALLTNGIGEVVTFSTGMDVPSVGEVIGVAANELAGRVIGGRVSTVSGRNITLDRAADVKAGNRLFLNLPSGVAQARTVQAVNSNIVTVTTAYSETPEAECCWGVDADDLFIALFRVTGTRNNDDGTFEVTGATYSPDIYASVDTGARLDERPVSIIPPGVQAPPENIVIDSYSTVSQNIAITTMRVAWDSVKGAIAYEAEWRRDSGNWVSVPRTSSQGFEVPGIYAGRYLVRVRAVNASDVSSIWATSAEVTLTGKVGNPPKPLGFTASENVVFGIELNWGFPANTDDTLKTEIQYSLTGSADDAMLLADVPYPLRRYQQMGLKAGQVFWYRAQLVDRTGNESGYTGWVRGQSSTDVTDITEAVLAQIKDTELFKDLIENAVDSSAKVAELAEAVRQNADGLAAAAGANRQTAEAIIGNALAIADVVVRQSAQQGANSAKFEQLREVIATETEARVTDVIRLEAKTDKNAAGITEVRQALATEEEARATAVDELTARTDKNAANVTVLTQTVTDLDSSTASRFEEISAEISGIDGSDIRGGIQSNSIALITTTLAQVNDRTRLSVQYGDNKAGIERVDNVMADASQAVAESLRSMDASSGAGTANTTDFAKTIADFSQVSATKINTLSVTVNGQQAAIVQNAQVSADINNNLNAMYSIKVGVDAAGRQYAAGMGIGVQNTPAGMQSQVIFLADRFAVMSQAGGTVSLPFLVQNGQTFINEAFINYASITLARVGSWYSANYVAGQTGTIMKADGTFEVNGAVSGQGRMQITNNRIISYDAQNRPAAVMGQRL

SEQ ID NO: 1917 - protein, 252 aa, Kosakonia cowanii
MSISSDVQKLEPGSRVRLIEVDGEAFGAGILRFHNETIPHSEAEITAAGGDASKLPPKSVWWQGLEYGAWPFELTGLSVSSDGQSARPTLTVANISGTIGALCRRFQGMAKAKVIIHETFAHYLDARNFAGGNPAANPTEERKQVYYIDRKSSSDDETVEFELSSPADLRGQLIPTRQIQPMCTWCMRGWYKTGNGCTYAGQNGWFDKDGNRVDDPSKDVCSGLLSTGCKPRFGANNELDYGGFPGASLLRG

SEQ ID NO: 1918 - protein, 252 aa, Kosakonia cowanii
MNLESLPKFYSPKSPKLNDQTPATGGVALTITDVMAAQGMVQSKASLGFNLFLAKMGIQDPAPAIDGLMQYALALKNPVLGKLSEKARVEVLPVLVQFAYADYSRSAASKSTCPHCEGKGVVREMQDVVKHTGVNGVEATVKHEAVEVMCQHCAGKGEVGTACRGCKGKGTVLDEKRTKLHGAPVRKVCGRCNGNRFSRLPTTLARARIEKIIPDLTSYQWYSGYGNVIALLVTKCWQEEAFAEVQLRKVTR

SEQ ID NO: 1919 - protein, 381 aa, Kosakonia cowanii
MAARPRSHKISVPNLYCKLDKRTGKIYWQYKHPLSGRFHSLGTDEAEAKQVATEANMIIAEQRTRQILSVNDRLARMKGKRTDITVTEWLDKYMAIQEERLKHNELRPNSFKQKNKPVRLFREHCGLQHLKDITTLDIAEITDAIKAEGHNRMAQVVRLVLIDVFKEAQHSGHVPPGYNPAQATKQPRNKVTRQRLSLDEWEKIYTSAEQQEPYLQCGMLLALITGQRLGDICNMQFKDIWDDMLHVEQEKTGSRLAIPLDLKCDVLGLSLRDVISKCRDAVISKYLVHFRHTSAQATRGDKVSTSSLTTTFRKARDKSGLNWDKGTAPTFHEQRSLSERLYREQGVDTQKLLGHKTQKMTDRYNDDRGKDWVIVSAKTGS

SEQ ID NO: 1920 - protein, 83 aa, Kosakonia cowanii
MKMINAAAVVLVSLMASGCASNTPPLCYNEAVVMKKKVSVPVFGIRKPVSTTEYLSGGSFGYQWVERSAFTDTSACDRLPVTE

SEQ ID NO: 1921 - protein, 317 aa, Kosakonia cowanii
MQMFIAGTSFDAINSMAASYVLDVITITGTGSKTYSLSGVSLTYAIVNDFMGGQLTGATYSVSVSGLTVSWNVNNAVTLIVYGSPVAGTQSDYFGFQLFQYINGVRTVKLAPNYVPLCLRQIIDVPAGARTVQTQVPAGNPVMCFHRHTGEAMDLCWWKPVTASGYHALQFPTAASNQTGCRVYVFSNILANIPDYGFFLYRDGQMVWHSNCLPLQVIPLTNGDITSATPLAVSSSVTSHIFVPQDPAYPTGYSNFMCASAGKDGAAYKVQVGKVFQSTYISNPDEGRRMRGWACGGVGYIDTRFYDQYYKNALGIT

SEQ ID NO: 1922 - protein, 488 aa, Kosakonia cowanii
MFSLNTLAVVVGACILTGCTVGPDYYRPEVPIAKHYHAQPALQQPTTSESASFSIWWENFGDPLLSRFVSDALTQNLDLAQASARMMQAQAGLGAATAALLPSGNISGQAARAYQSVETPLGQVLSSTPDYNRYGSSYETDLNAGWEIDLFGGLRRGRQAALADYQASEAGVAATRLAVAAQTADIYITLRGLQSRLDIANKQVITQQLLLEKVQLLHSKGLASEYQVRQTEGALAQVKATVPVLNNGLDGAMNALDVMLGTPPGTHHAQLASPGAIPHTPAITAMGTPADLLRRRPDIIVAERHLAASSARIGVAVSEYYPKFSLNALLGSATAVSGDNLFTAGASQSAGVLGLRWRLFDFGRINAQIKQAEGQEAEALAAYRLSVLRAAEDVENAFSALVNRQTQAATLTSGETALASARQSSFVAFQQGTASLIDVLHNDETLLQASDARAQAQTEAAHAAVAAFRALGGGWQSTLSEEIANTPG

SEQ ID NO: 1923 - protein, 513 aa, Kosakonia cowanii
MKFNLLLTLAAAGLGFSCAANATWDEKFWNPKPLADDVILPLPCDGAMAFRKVAIPLDKPLADYSITLGEEGNEWGYIEQSRPDHIAGSFPQEKKEKGRYYLMAKYELTDLQYRALSGDCAKPDIKGRLPKVNIGWMDAMSIADKYNLWLRKEKPDALPQDDKQPGFLRLPTETEWEFAARGGLSVSSAEFRDRHFPMPEGLNGYVWFAGAQSANNKLQLTGLLKPNPLGLHDMLGNVGEMMFEPFRLNKLDRLHGKAGGYIVRGGSYLTPQADIRSSLRGEEPYYTAQGENSSKANGMRLVLVSTTLTSRDRIKEIEKEWQALGTESKAAKKPGEGADSLQNLNAISAKVQDEGVKKELESLRNELRANSQLRDEQRDQAIRTSLQLGAFLCTKMKDDGEFLDRLNQLYSKTCAAGSQLDANCSRRQEQLDQHKKALEFITSYYADTLVDMGTTYNKSLIDPQMTVVQQQMAARGKTNLNGYLNTYWGNLQGYWKDGKVARDAWLSACKKNN

SEQ ID NO: 1924 - protein, 410 aa, Kosakonia cowanii
MSSSLPETRPRMGLLLNMALRDLIHDRKVALCIVFSLIAVIAPLLLLFGLKNGIVSQLRHDLLDDPRTREVRMTGNGNYDLAWLNALAARPEVGFSIPLTRSLNTQADLVRDGQHFAAGAEVIPSAKGDPLLRESGVLPHGSTVVLSNSAARKLDVKAGDTFRLFISRKRDGQNQRTSLSVSVGAILDEARFARPALFVDLPLLVALEDYRDGFQVPLLGVTDGENARERHNFARARLYAATLDDVAPLAQWLESQHIEAITQAAQIEAVRAIDRVLGVIFAVIAWISASGCIASLIGAFIANIDRKRKDMAVLRLLGFRRQAVTLFIMIQALCLTGVAFIAGLLIYGAGSALFNHLLGANLPESAFVCHLDPGHFAAAFLSVLAVALGVAAIGALRALKIEPAESLREI

SEQ ID NO: 1925 - protein, 261 aa, Kosakonia cowanii
MTTENLAQMGAARVVRRVNATGIAVIEKAPVSKVEYAFYHQVAPELNRAEILTPALLAADASTRALTLEAIPYPVSQQNVANDAIVSMLARLHRFAPDKNWNYHPHRWPDAQLALSLQLLALPEEAASVLRRCQRESDRLFAEAGLISGDSNAGNWGQRENGEFVLFDWERFSTGHPAIDLAPLIKGMGTPEEYRHLAARYCRFNPRSENDLARDIALAKAWIVSEVITLLHKRQKADFPRFQHWYRSYLPDWLREVEKMK

SEQ ID NO: 1926 - protein, 650 aa, Kosakonia cowanii
MKTRVWLGGFLCLTAATMGAHAADQKPLLQEGKHSLYQRVLTYPGCQLAPKAGEAGKEQPAFSRFYVYQRSKQGQDEWLQVGPDSFGHVSGWLKAACTVDWKMQLTLAFTNPAGRHPMLFFRDKSDVESLLNNPKPAAALDPLLANLKSNKPVPQVLAKEPDYMVDQQKNFYLLPVLGSDDVFTDSGFQVRVLNVASVSEKAPEKAAKAADEKNMMKGFSASVVFVIDSTISMGPYIDRTKEAIDKIYQRIEKEHLQDQVKFGLVAFRSNVKAVPGLEYDSKMYVDPNTVKDGKDFLAKVHDLKQATVSSSKVDEDAYGGVMTALDKVDWTQFGARYVILITDAGALEGGDNLSSTHLDAAQVRQEAAYRGVALYTLHLKTPSGKKNHAAAEAQYQDLTLNPFLHKPLYYPIDSGDVNNFGTMVDSLANAITGQIKTAWSGEETAGSALGASEEYAGKKADPLLSDADKLSKAMRLAYLGEKQGTQAPPVFKSWISDRDLVNQNIPATEVRVLLTKSELSDLSDVMKKIVNAANEGLISPDDMFASLRSLAATMGNDPNQAKSKNATRLGELGLLGEYIEGLPYLSEVLSLDEETWKSWDGLEQERFIRRLNTKLNYYQRYNQDVDRWISLAPDSDPRDNVYPVPLENLP

SEQ ID NO: 1927 - protein, 261 aa, Kosakonia cowanii
MTTENLAQMGAARVVKRVNASGIAVIEKAPVSKVEYAFYHQVAPELNRAEIFTPALLAADASTRVLTLEAIPYPVSQQNVANDAIVSMLARLHRFAPDKNWHYHPHRWPDAQLALSLHLLALPEAATRALRRCQRDSDRLFAEAGLISGDSNAGNWGQRENGEFVLFDWERFSTGHPAIDLAPLIKGMGTPEEYRHLAARYCRFNPRSENDLTRDIALAKAWIVSEVITLLHKRQKADFPRFQHWYRSYLPDWLKEVEKII

SEQ ID NO: 1928 - protein, 650 aa, Kosakonia cowanii
MKTRVWLGGFLCLTAATMGAHAADQKPLLQEGKHSLYQRVLTYPGCQLAPKAGEAGKEQPAFSRFYVYQRSKQGQDEWLQVGPDSFGHVSGWLKAACTVDWKMQLTLAFTNPAGRHPMLFFRDKSDVESLLNNPKPAAALDPLLANLKSNKPVPQVLAKEPDYMVDQQKNFYLLPVLGSDDVFTDSGFQVRVLNVASVSEKAPEKAAKAADEKNMMKGFSASVVFVIDSTISMGPYIDRTKEAIDKIYQRIEKEHLQDQVKFGLVAFRSNVKAVPGLEYDSKMYVDPNTVKDGKDFLAKVHDLKQATVSSSKVEEDAYGGVMTALDKVDWTQFGARYVILITDAGALEGGDNLSSTHLDAAQVRQEAAYRGVALYTLHLKTPSGKKNHAAAEAQYHDLTLNPFLHKPLYYPIDSGDVNNFGAMVDSLANAITGQIKTAWSGEETAGSALGASEEYAGKKADPLLSDADKLSKAMRLAYLGEKQGTQAPPVFKSWISDRDLVNQNIPATEVRVLLTKSELSDLSDVMKKIVNAANEGLISPDDMFASLRSLAATMGNDPNQAKSKNATRLGELGLLGEYIEGLPYLSEVLSLDEETWKSWDGLEQERFIRRLNTKLNYYQRYNQDVDRWISLAPDSDPRDNVYPVPLENLP

SEQ ID NO: 1929 - protein, 410 aa, Kosakonia cowanii
MSSSLPETRPRMGLLLNMALRDLIHDRKVALCIVFSLIAVIAPLLLLFGLKNGIVSQLRHDLLDDPRTREVRMTGNGNYDLAWLNALAARPEVGFSIPLTRSLNTQADLVRDGQHFAAGAEVIPSAKGDPLLRESGVLPHGSTVVLSNSAARKLDVKAGDTFRLFVSRKRDGQNQRTSLSVSVGAILDEARFARPALFVDLPLLVALEDYRDGFQAPLLGVTDGENARERHNFARARLYAATLDDVAPLAQWLESQHIEAITQAAQIEAVRAIDRVLGVIFAVIAWISASGCIASLIGAFIANIDRKRKDMAVLRLLGFRRQTVTLFIMIQALCLTGVAFIAGLLIYGAGSALFNHLLGANLPESAFVCHLDPGHFAAAFLSVLAVALGVAAIGALRALKIEPAESLREI

SEQ ID NO: 1930 - protein, 513 aa, Kosakonia cowanii
MKFNLLLTLAAAGLGFSCAANATWDEKFWNPKPLADDVILPLPCDGAMAFRKIAIPLDKPLADYSITLGEEGNEWGYIEQSRPDHIAGSFPQEKKEKGRYYLMAKYELTDLQYRALSGDCAKPDIKGRLPKVNIGWMDAMSIADKYNLWLRKEKPDALPQDDKQPGFLRLPTETEWEFAARGGLSVSSAEFRDRHFPMPEGLNGYVWFAGAQSANNKLQLTGLLKPNPLGLHDMLGNAGEMMFEPFRLNKLDRLHGKAGGYIVRGGSYLTPQTDIRSSLRGEEPYYTAQGENSSKANGMRLVLVSTTLTSRDRIKEIEKEWQALGTESKAAKKPGEGADSLQNLNAISAKVQDEGVKKELESLRNELRANSQLRDEQRDQAIRTSLQLGAFLCTKMKDDGEFLDRLNQLYSKTCAAGSQLDANCSRRQEQLDQHKKALEFITSYYADTLVDMGTTYNKSLIDPQMTVVQQQMAARGKTNLNGYLNTYWGNLQGYWKDGKVARDAWLSACKKNN

SEQ ID NO: 1931 - protein, 76 aa, Kosakonia cowanii
MSLPWSIDDSRESGANGRRNPRSENDLARDIALAKAWIVSEVITLLHKRQKADFPRFQHWYRSYLPDWLKQIETVI

SEQ ID NO: 1932 - protein, 410 aa, Kosakonia cowanii
MSSSLPETRPRMGLLLNMALRDLIHDRKVALCIVFSLIAVIAPLLLLFGLKNGIVSQLRHDLLDDPRTREVRMTGNGNYDLAWLNALAARPEVGFSIPLTRSLNTQADLVRDGQHFAAGAEVIPSAKGDPLLRESGVLPHGSTVVLSNSAARKLDVKAGDTFRLFISRKRDGQNQRTSLSVSVGAILDEARFARPALFVDLPLLVALEDYRDGFQVPLLGVTDGENARERHNFARARLYAATLDDVASLAQWLESQHIEAITQAAQIEAVRAIDRVLGVIFAVIAWISASGCIASLIGAFIANIDRKRKDMAVLRLLGFRRQAVTLFIMIQALCLTGVAFIAGLLIYGAGSALFNHLLGANLPESAFVCHLDPGHFAAAFLSVLAVALGVAAIGALRALKIEPAESLREI

SEQ ID NO: 1933 - protein, 650 aa, Kosakonia cowanii
MKTRVWLGGFLCLTAATMGAHAADQKPLLQEGKHSLYQRVLTYPGCQLAPKAGEAGKEQPAFSRFYVYQRSKQGQDEWLQVGPDSFGHVSGWLKAACTVDWKMQLTLAFTNPAGRHPMLFFRDKSDVESLLNNPKPAAALDPLLANLKSNKPVPQVLAKEPDYMVDQQKNFYLLPVLGSDDVFTDSGFQVRVLNVASVSEKAPEKAAKAADEKNMMKGFSASVVFVIDSTISMGPYIDRTKEAIDKIYQRIEKEHLQDQVKFGLVAFRSNVKAVPGLEYDSKMYVDPNTVKDGKDFLAKVHDLKQATVSSSKVEEDAYGGVMTALDKVDWTQFGARYVILITDAGALEGGDNLSSTHLDAAQVRQEAAYRGVALYTLHLKTPSGKKNHAAAEAQYQDLTLNPFLHKPLYYPIDSGDVNNFGAMVDSLANAITGQIKTAWSGEETAGSALGASEEYAGKKADPLLSDADKLSKAMRLAYLGEKQGTQAPPVFKSWISDRDLVNQNIPATEVRVLLTKSELSDLSDVMKKIVNAANEGLISPDDMFASLRSLAATMGNDPNQAKSKNATRLGELGLLGEYIEGLPYLSEVLSLDEETWKSWDGLEQERFIRRLNTKLNYYQRYNQDVDRWISLAPDSDPRDNVYPVPLENLP

SEQ ID NO: 1934 - protein, 410 aa, Kosakonia cowanii
MSSSLPETRPRMGLLLNMALRDLIHDRKVALCIVFSLIAVIAPLLLLFGLKNGIVSQLRHDLLDDPRTREVRMTGNGNYDLAWLNALAARPEVGFSIPLTRSLNTQADLVRDGQHFAAGAEVIPSAKGDPLLRESGVLPHGSTVVLSNSAARKLDVKAGDTFRLFVSRKRDGQNQRTSLSVSVGAILDEARFARPALFVDLPLLVALEDYRDGFQAPLLGVTDGENARERHNFARARLYAATLDDVAPLAQWLESQHIEAITQAAQIEAVRAIDRVLGVIFAVIAWISASGCIASLIGAFIANIDRKRKDMAVLRLLGFRRQAVTLFIMIQALCLTGVAFIAGLLIYGAGSALFNHLLGANLPESAFVCHLDPGHFAAAFLSVLAVALGVAAIGALRALKIEPAESLREI

SEQ ID NO: 1935 - protein, 261 aa, Kosakonia cowanii
MTTENLAQMGAARVVKRVNATGIAVIEKAPVSKVEYAFYHQVAPELNRAEILTPALLAADASTRALTLEAIPYPVSQQNVANDAIVSMLARLHRFAPDKNWHYHPHRWPDAQLELSLQLLALPEEAARVLRRCQRESDRLFAEAGLISGDSNAGNWGQRENGEFVLFDWERFSTGHPAIDLAPLIKGMGTPEEYRHLAARYCRFNPRSENDLARDIALAKAWIVSEVITLLHKRQKADFPRFQHWYRSYLPDWLKQTGTLI

SEQ ID NO: 1936 - protein, 513 aa, Kosakonia cowanii
MKFNLLLTLAAAGLGFSCAANATWDEKFWNPKPLADDVILPLPCDGAMAFRKVAIPLDKPLADYSITLGEEGNEWGYIEQSRPDHIAGSFPQEKKEKGRYYLMAKYELTDLQYRALSGDCAKPDIKGRLPKVNIGWMDAMSIADKYNLWLRKEKPDALPQDDKQPGFLRLPTETEWEFAARGGLSVSSAEFRDRHFPMPEGLNGYVWFAGAQSANNKLQLTGLLKPNPLGLHDMLGNVGEMMFEPFRLNKLDRLHGKAGGYIVRGGSYLTPQADIRSSLRGEEPYYTAQGENSSKANGMRLVLVSTTLTSRDRIKEIEKEWQALGTESKAAKKPGEGADSLQNLNAISAKVQDEGVKKELESLRNELRANSQLRDEQRDQAIRTSLQLGAFLCTKMKDDGEFLDRLNQLYSKTCAAGSQLDANCSRRQEQLDQHKKALEFITSYYADTLVDMGTTYNKSLIDPQMTVVQQQMAARGKNNLNGYLNTYWGNLQGYWKDGKVARDAWLSACKKNN

SEQ ID NO: 1937 - protein, 650 aa, Kosakonia cowanii
MKTRVWLGGFLCLTAATMGAHAADQKPLLQEGKHSLYQRVLTYPGCQLAPKAGEAGKEQPAFSRFYVYQRSKQGQDEWLQVGPDSFGHVSGWLKAACTVDWKMQLTLAFTNPAGRHPMLFFRDKSDVESLLNNPKPAAALDPLLANLKSNKPVPQVLAKEPDYMVDQQKNFYLLPVLGSDDVFTDSGFQVRVLNVASVSEKAPEKAAKAADEKNMMKGFSASVVFVIDSTISMGPYIDRTKEAIDKIYQRIEKEHLQDQVKFGLVAFRSNVKAVPGLEYDSKMYVDPNTVKDGKDFLAKVHDLKQATVSSSKVDEDAYGGVMTALDKVDWTQFGARYVILITDAGALEGGDNLSSTHLDAAQVRQEAAYRGVALYTLHLKTPGGKKNHAAAEAQYQDLTLNPFLHKPLYYPIDSGDVNNFGTMVDSLANAITGQIKTAWSGEETAGSALGASEEYAGKKANPLLSDADKLSKAMRLAYLGEKQGTQAPPVFKSWISDRDLVNQNIPATEVRVLLTKSELSDLSDVMKKIVNAANEGLISPDDMFASLRSLAATMGNDPNQAKSKNATRLGELGLLGEYIEGLPYLSEVLSLDEETWKSWDGLEQERFIRRLNTKLNYYQRYNQDVDRWISLAPDSDPRDNVYPVPLENLP

SEQ ID NO: 1938 - protein, 261 aa, Kosakonia cowanii
MTTENLAQMGAARVVKRVNATGIAVIEKAPVSKVEYAFYHQVAPELNRAEILTPALLAADASTRALTLEAIPYPVSQQNVANDAIVSMLARLHRFAPDKNWHYHPHRWPDAQLALSLQLLALPEEAARVLRRCQRESDRLFAEAGLISGDSNAGNWGQRENGEFVLFDWERFSTGHPAIDLAPLIKGMGTPEEYRHLAARYCRFNPRSENDLARDIALAKAWIVSEVITLLHKRQKADFPRFQHWYRSYLPDWLREVEKMK

SEQ ID NO: 1939 - protein, 261 aa, Kosakonia cowanii
MTTENLAQMGAARVVKRVNAAGIAVIEKVPVSKVEYAFYHQVAPELNRAEIFTPALLAADASTRALTLEAIPYPVSQQNVANDAIVSMLARLHRFAPDKNWHYHTHRWPDAQLELSLHLLALPEAAARALRRCQRDSDRLFAEAGLISGDSNAGNWGQRENGEFVLFDWERFSTGHPAIDLAPLIKGMGTPEEYRHLAARYCRFNPRSENDLTRDIALAKAWIVSEVITLLHKRQKADFPRFQHWYRSYLPDWLREVEKMM

SEQ ID NO: 1940 - protein, 513 aa, Kosakonia cowanii
MKFNLLLTLAAAGLGFSCAANATWDEKFWNPKPLADDVILPLPCDGAMAFRKVAIPLDKPLADYSITLGEEGNEWGYIEQSRPDHIAGSFPQEKKEKGRYYLMAKYELTDLQYRALSGDCAKPDIKGRLPKVNIGWMDAMSIADKYNLWLRKEKPDALPQDDKQPGFLRLPTETEWEFAARGGLSVSSAEFRDRHFPMPEGLNGYVWFAGAQSANNKLQLTGLLKPNPLGLHDMLGNAGEMMFEPFRLNKLDRLHGKAGGYIVRGGSYLTPQADIRSSLRGEEPYYTAQGENSSKANGMRLVLVSTTLTSRDRIKEIEKEWQALGTESKAAKKPGEGADSLQNLNAISAKVQDEGVKKELESLRNELRANSQLRDEQRDQAIRTSLQLGAFLCTKMKDDGEFLDRLNQLYSKTCAAGSQLDANCSRRQEQLDQHKKALEFITSYYADTLVDMGTTYNKSLIDPQMTVVQQQMAARGKTNLNGYLNTYWGNLQGYWKDGKVARDAWLSACKKNN

SEQ ID NO: 1941 - protein, 261 aa, Kosakonia cowanii
MTTENLAQMGAARVVKRVNATGIAVIEKVPVSKVEYAFYHQVAPELNRAEILTPALLAADASTLALTLEAIPYPVSQQNVANDAIVSMLARLHRFAPDKNWHYHPHRWPDAQLELSLQLLALPEEAASVLRRCQRESDRLFAEAGLISGDSNAGNWGQRENGEFVLFDWERFSTGHPAIDLAPLIKGMGTPEEYRHLAARYCRFNPRSENDLARDIALAKAWIVSEVITLLHKRQKADFPRFQHWYRSYLPDWLREVEKMK

SEQ ID NO: 1942 - protein, 513 aa, Kosakonia cowanii
MKFNLLLTLAAAGLGFSCAANATWDEKFWNPKPLADDVILPLPCDGAMAFRKVAIPLDKPLADYSITLGEEGNEWGYIEQSRPDHIAGSFPQEKKEKGRYYLMAKYELTDLQYRALSGDCAKPDIKGRLPKVNIGWMDAMSIADKYNLWLRKEKPDALPQDDKQPGFLRLPTETEWEFAARGGLSVSSAEFRDRHFPMPEGLNGYVWFAGAQSANNKLQLTGLLKPNPLGLHDMLGNVGEMMFEPFRLNKLDRLHGKAGGYIVRGGSYLTPQADIRSSLRGEEPYYTAQGENSSKATGMRLVLVSTTLTSRDRIKEIEKEWQALGTESKAAKKPGEGADSLQNLNAISAKVQDEGVKKELESLRNELRANSQLRDEQRDQAIRTSLQLGAFLCTKMKDDGEFLDRLNQLYSKTCATGSQLDANCSRRQEQLDQHKKALEFITSYYADTLVDMGTTYNKSLIDPQMTVVQQQMAARGKTNLNGYLNTYWGNLQGYWKDGKVARDAWLSACKKNN

SEQ ID NO: 1943 - protein, 650 aa, Kosakonia cowanii
MKTRVWLGGFLCLTAATMGAHAADQKPLLQEGKHSLYQRVLTYPGCQLAPKAGEAGKEQPAFSRFYVYQRSKQGQDEWLQVGPDSFGHVSGWLKAACTVDWKMQLTLAFTNPSGRHPMLFFRDKSDVESLLNNPKPAAALDPLLANLKSNKPVPQVLAKEPDYMVDQQKNFYLLPVLGSDDVFTDSGFQVRVLNVASVSEKAPEKAAKAADEKNMMKGFSASVVFVIDSTISMGPYIDRTKEAIDKIYQRIEKEHLQDQVKFGLVAFRSNVKAVPGLEYDSKMYVDPNTVKDGKDFLAKVHDLKQATVSSRKVDEDAYGGVMTALDKVDWTQFGARYVILITDAGALEGGDNLSSTHLDAAQVRQEAAYRGVALYTLHLKTPSGKKNHAAAEAQYQDLTLNPFLHKPLYYPIDSGDVNNFGTMVDSLANAITGQIKTAWSGEETAGSALGASEEYAGKKADPLLSDADKLSKAMRLAYLGEKQGTQAPPVFKSWISDRDLVNQNIPATEVRVLLTKSELSDLSDVMKKIVNAANEGLISPDDMFASLRSLAATMGNDPNQAKSKNATRLGELGLLGEYIEGLPYLSEVLSLDEETWKSWDGLEQERFIRRLNTKLNYYQRYNQDVDRWISLAPDSDPRDNVYPVPLENLP

SEQ ID NO: 1944 - protein, 410 aa, Kosakonia cowanii
MSSSLPETRPRMGLLLNMALRDLIHDRKVALCIVFSLIAVIAPLLLLFGLKNGIVSQLRHDLLDDPRTREVRMTGNGNYDLAWLNALAARPEVGFSIPLTRSLNTQADLVRDGQHFAAGAEVIPSAKGDPLLRESRVLPHGSTVVLSNSAARKLDVKAGDTFRLFISRKRDGQNQRTSLSVSVGAILDEARFARPALFVDLPLLVALEDYRDGFQVPLLGVTDGENARERHNFARARLYAATLDDVAPLAQWLESQHIEAITQAAQIEAVRAIDRVLGVIFAVIAWISASGCIASLIGAFIANIDRKRKDMAVLRLLGFRRQAVTLFIMIQALCLTGVAFIAGLLIYGAGSALFNHLLGANLPESAFVCHLDPGHFAAAFLSVLAVALGVAAIGALRALKIEPAESLREI

SEQ ID NO: 1945 - protein, 261 aa, Kosakonia cowanii
MTTENLAQMGAARVVKRVNATGIAVIEKAPVSKVEYAFYHQVAPELNRAEILTPALLAADASTRALTLEAIPYPVSQQNVANDAIVSMLARLHRFAPDKNWHYHPHRWPDAQLELSLQLLALPEEAARVLRRCQRESDRLFAEAGLISGDSNAGNWGQRENGEFVLFDWERFSTGHPAIDLAPLIKGMGTPEEYRHLAARYCRFNPRSENDLARDIALAKAWIVSEVITLLHKRQKADFPRFQHWYRSYLPDWLREVEKMK

SEQ ID NO: 1946 - protein, 261 aa, Kosakonia cowanii
MTTENLAQMGAARVVKRVNAAGIAVIEKVPVSKVEYAFYHQVAPELNRAEIFTPALLAADASTCALTLEAIPYPVSQQNVANDAIVSMLARLHRFAPDKNWHYHPHRWPDAQLELSLHLLALPEAATRALRRCQRDSDRLFAEAGLISGDSNAGNWGQRENGEFVLFDWERFSTGNPAIDLAPLIKGMGTPEEYRHLAARYCRFNPRSENDLTRDIALAKAWIVSEVITLLHKRQKADFPRFQHWYRSYLPDWLREVEKMI

SEQ ID NO: 1947 - protein, 513 aa, Kosakonia cowanii
MKFNLLLTLAAAGLGFSCAANATWDEKFWNPKPLADDVILPLPCDGAMAFRKVAIPLDKPLADYSITLGEEGNEWGYIEQSRPDHIAGSFPQEKKEKGRYYLMAKYELTDLQYRALSGDCAKPDIKGRLPKVNIGWMDAMSIADKYNLWLRKEKPDALPQDDKQPGFLRLPTETEWEFAARGGLSVSSAEFRDRHFPMPEGLNGYVWFAGAQSANNKLQLTGLLKPNPLGLHDMLGNAGEMMFEPFRLNKLDRLHGKAGGYIVRGGSYLTPQTDIRSSLRGEEPYYTAQGENSSKANGMRLVLVSTTLTSRDRIKEIEKEWQALGTESKAAKKPGEGADSLQNLNAISAKVQDEGVKKELESLRNELRANSQLRDEQRDQAIRTSLQLGAFLCTKMKDDGEFLDRLNQLYSKTCAAGSQLDANCSRRQEQLDQHKKALEFITSYYADTLVDMGTTYNKSLIDPQMTVVQQQMAARGKTNLNGYLNTYWGNLQGYWKDGKVARDAWLSACKKNN

SEQ ID NO: 1948 - protein, 261 aa, Kosakonia cowanii
MTTENLAQMGAARVVKRVNADGITVIEKAPVSDVEYAFYHQVAPALNRAEIFTPALLAADVDARALTLEAIPYPVSQQNVASDAIVSMLARLHRFAPDKKWYYHTHRWPNAQLELSLQLLALPQEAADVLRRCQRESDKLFAEASLISGDSNAGNWGQRENGEYVLFDWERFSTGHPAIDLAPLIKGMGSPDEYQHLAARYCRFNPLPDNDLARHIALAKAWIVSEVITLLHKRQKADFPRFQHWYRGHLPDWLKQIETVI

SEQ ID NO: 1949 - protein, 261 aa, Kosakonia cowanii
MTTENLAQMGAARVVKRVNATGIAVIEKAPVSKVEYAFYHQVAPELNRAEILTPALLAADASTRALTLEAIPYPVSQQNVANDAIVSMLARLHRFAPDKNWHYHPHRWSDAQLALSLQLLALPEEAARVLRRCQRESDRLFAEAGLISGDSNAGNWGQRENGEFVLFDWERFSTGHPAIDLAPLIKGMGTPEEYRHLAARYCRFNPRSENDLARDIALAKAWIVSEVITLLHKRQKADFPRFQHWYRSYLPDWLKQTGTLI

SEQ ID NO: 1950 - protein, 261 aa, Kosakonia cowanii
MTAENLAQMGAARVVKRINAAGIVVIEKAPVSEVEYAFYHQVAPELNRAEIFTPALLAADASTRALILEAIPSPVSQQNVTCDAIVSMLARLHRFAPDRNWHYHPHRWPDAQLELSLHLLALPEAAARALRRCQRDSDKLFAEAGLISGDSNAGNWGQRENGEFVLFDWERFSTGHPAIDLAPLIKGMGTPEEYRRLAARYCRFNPRSENDLARDIALAKAWIVSEVITLLHQRQKADFPRFQHWYRCYLPDWLKQIETVI

SEQ ID NO: 1951 - protein, 261 aa, Kosakonia cowanii
MTTENLAQMGAARVVKRVNATGIAVIEKAPVSEVEYAFYHQVAPELNRAEILTPALLAADASTRALTLEAIPYPVSQQNVANDAIVSMLARLHRFAPDKNWHYHPHRWPDAQLALSLQLLALPEEAARVLRRCQRESDRLFAEAGLISGDSNAGNWGQRENGEFVLFDWERFSTGHPAIDLAPLIKGMGTPEEYRHLAARYCRFNPRSENDLARDIALAKAWIVSEVITLLHKRQKADFPRFQHWYRSYLPDWLREVEKMK

SEQ ID NO: 1952 - protein, 650 aa, Kosakonia cowanii
MKTRVWLGGFLCLTATTMGAHAADQKPLLQEGKHSLYQRVLTYPGCQLAPKAGEAGKEQPAFSRFYVYQRSKQGQDEWLQVGPDSFGHVSGWLKAACTVDWKMQLTLAFTNPAGRHPMLFFRDKSDVESLLNNPKPAAAFDPLLANLKSNKPVPQVLAKEPDYMVDQQKNFYLLPVLGSDDVFTDSGFQVRVLNVASVSEKAPEKAAKAADEKNMMKGFSASVVFVIDSTISMGPYIDRTKEAIDKIYQRIEKEHLQDQVKFGLVAFRSNVKAVPGLEYDSKMYVDPNTVKDGKDFLAKVHDLKQATVSSSKVDEDAYGGVMTALDKVDWTQFGARYVILITDAGALEGGDNLSSTHLDAAQVRQEAAYRGVALYTLHLKTPSGKKNHAAAEAQYQDLTLNPFLHKPLYYPIDSGDVNNFGTMVDSLANAITGQIKTAWSGEETAGSALGASEEYAGKKADPLLSDADKLSKAMRLAYLGEKQGTQAPPVFKSWISDRDLVNQNIPATEVRVLLTKSELSDLSDVMKKIVNAANEGLISPDDMFASLRSLAATMGNDPNQAKSKNATRLGELGLLGEYIEGLPYLSEVLSLDEETWKSWDGLEQERFIRRLNTKLNYYQRYNQDVDRWISLAPDSDPRDNVYPVPLENLP

SEQ ID NO: 1953 - protein, 410 aa, Kosakonia cowanii
MSSSLPETRPRMGLLLNMALRDLIHDRKVALCIVFSLIAVIAPLLLLFGLKNGIVSQLRHDLLDDPRTREVRMTGNGNYDLAWLNALAARPEVGFSIPLTRSLNTQADLVRDGQHFAAGAEVIPSAKGDPLLRESGVLPHGSTVVLSNSAARKLDVKAGDTFRLFISRKRDGQNQRTSLSVSVGAILDEARFARPALFVDLPLLVALEDYRDGFQVQLLGVTDGENARERHNFARARLYAATLDDVAPLAQWLESQHIEAITQAAQIEAVRAIDRVLGVIFAVIAWISASGCIASLIGAFIANIDRKRKDMAVLRLLGFRRQAVTLFIMIQALCLTGVAFIAGLLIYGAGSALFNHLLGANLPESAFVCHLDPGHFAAAFLSVLAVALGVAAIGALRALKIEPAESLREI

SEQ ID NO: 1954 - protein, 261 aa, Kosakonia cowanii
MTTENLAQMGAARVVKRVNATGIVVIEKAPVSKVEYAFYHQVAPELNRAEILTPALLAADASTRALTLEAIPYPVSQQNVANDAIVSMLARLHRFAPDKNWNYHPHRWPDAQLALSLQLLALPEEAASVLRRCQRESDRLFAEAGLISGDSNAGNWGQRENGEFVLFDWERFSTGHPAIDLAPLIKGMGTPEEYRHLAARYCRFNPWSENDLARDIALAKAWIVSEVITLLHKRQKADFQRFQHWYRSYLPDWLREVEKMK

SEQ ID NO: 1955 - protein, 650 aa, Kosakonia cowanii
MKTRVWLGGFLCLTAATMGAHAADQKPLLQEGKHSLYQRVLTYPGCQLAPKAGEAGKEQPAFSRFYVYQRSKQGQDEWLQVGPDSFGHVSGWLKAACTVDWKMQLTLAFTNPAGRHPMLFFRDKSDVESLLNTPKPAAALDPLLANLKSNKPVPQVLAKEPDYMVDQQKNFYLLPVLGSDDVFTDSGFQVRVLNVASVSEKAPEKAAKAADEKNMMKGFSASVVFVIDSTISMGPYIDRTKEAIDKIYQRIEKEHLQDQVKFGLVAFRSNVKAVPGLEYDSKMYVDPNTVKDGKDFLAKVHDLKQATVSSSKVDEDAYGGVMTALDKVDWTQFGARYVILITDAGALEGGDNLSSTHLDAAQVRQEAAYRGVALYTLHLKTPSGKKNHAAAEAQYQDLTLNPFLHKPLYYPIDSGDVNNFGTMVDSLANAITGQIKTAWSGEETAGSALGASEEYAGKKADPLLSDADKLSKAMRLAYLGEKQGTQAPPVFKSWISDRDLVNQNIPATEVRVLLTKSELSDLSDVMKKIVNAANEGLISPDDMFASLRSLAATMGNDPNQAKSKNATRLGELGLLGEYIEGLPYLSEVLSLDEETWKSWDGLEQERFIRRLNTKLNYYQRYNQDVDRWISLAPDSDPRDNVYPVPLENLP

SEQ ID NO: 1956 - protein, 410 aa, Kosakonia cowanii
MSSSLPETRPGMGLLLNMALRDLIHDRKVALCIVFSLIAVIAPLLLLFGLKNGIVSQLRHDLLDDPRTREVRMTGNGNYDLAWLNALAARPEVGFSIPLTRSLNTQADLVRDGQHFAAGAEVIPSAKGDPLLRESRVPPHGSTVVLSNSAARKLDVKAGDTFRLFVSRKRDGQNQRTSLSVSVGAILDEARFARPALFVDLPLLVALEDYRDGFQVPLLGVTDGENARERHNFARARLYAATLDDVAPLAQWLESQHIEAITQAAQIEAVRAIDRVLGVIFAVIAWISASGCIASLIGAFIANIDRKRKDMAVLRLLGFRRQAVTLFIMIQALCLTGVAFIAGLLIYGAGSALFNHLLGANLPESAFVCHLDPGHFAAAFLSVLAVALGVAAIGALRALKIEPAESLREI

SEQ ID NO: 1957 - protein, 261 aa, Kosakonia cowanii
MTTENLAQMGAARVVKRVNATGIAVIEKAPVSKVEYAFYHQVAPELNRAEILTPALLAADASTRALTLEAIPYPVSQQNVANDAIVSMLARLHRFAPDKNWHYHPHRWPDAQLELSLQLLALPEEAARVLRRCQRESDRLFAEAGLISGDSNAGNWGQRENGEFVLFDWERFSTGHPAIDLAPLIKGMGTPEEYRHLAARYCRFNPRSENDLARDIALAKAWIVSEVTTLLHKRQKADFPRFQHWYRSYLPDWLREMEKMM

SEQ ID NO: 1958 - protein, 650 aa, Kosakonia cowanii
MKTRVWLGGFLCLTAATMGAHAADQKPLLQEGKHSLYQRVLTYPGCQLAPKAGEAGKEQPAFSRFYVYQRSKQGQDEWLQVGPDSFGHVSGWLKAACTVDWKMQLTLAFTNPAGRHPMLFFRDKSDVESLLNNPKPAAAFDPLLANLKSNKPVPQVLAKEPDYMVDQQKNFYLLPVLGSDDVFTDSGFQVRVLNVASVSEKAPEKAAKAADEKNMMKGFSASVVFVIDSTISMGPYIDRTKEAIDKIYQRIEKEHLQDQVKFGLVAFRSNVKAVPGLEYDSKMYVDPNTVKDGKDFLAKVHDLKQATVSSSKVDEDAYGGVMTALDKVDWTQFGARYVILITDAGALEGGDNLSSTHLDAAQVRQEAAYRGVALYTLHLKTPSGKKNHAAAEAQYQDLTLNPFLHKPLYYPIDSGDVNNFGTMVDSLANAITGQIKTAWSGEETAGSALGASEEYAGKKADPLLSDADKLSKAMRLAYLGEKQGTQAPPVFKSWISDRDLVNQNIPATEVRVLLTKSELSDLSDVMKKIVNAANEGLISPDDMFASLRSLAATMGNDPNQAKSKNATRLGELGLLGEYIEGLPYLSEVLSLDEETWKSWDGLEQERFIRRLNTKLNYYQRYNQDVDRWISLAPDSDPRDNVYPVPLENLP

SEQ ID NO: 1959 - protein, 261 aa, Kosakonia cowanii
MTAENLAQMGAARVVKRINAAGITVIEKAPVSEVEYAFYHQVAPELKRAEILTPALLAANASSRALTLEAIPSPVSQQNVTCDAIVSMLARLHRFAPDRNWHYHTHRWPDAQLELCLHLLALPEEAASVLRRCQRYSDKLFAEAGLISGDSNAGNWGQRENGEFVLFDWERFSTGHPAIDLAPLIKGMGTPEEYQRLAARYCRFNPRSENDLARDIALAKAWIVSEVITLLHQRQKADFPRFQHWYRCYLPDWLKQIETVI

SEQ ID NO: 1960 - protein, 262 aa, Kosakonia cowanii
MSAMDLSKMGTARVVQKTNDCGQIVIEKWPVSDVEWAFYHSAATALNQAEVATPSLLSADATSRQLTMEYIPHQVEQANVANDDAIAMLGRLHRYPADPEWLYHPHIWTEKALENALVLLALPEKSVQQLRRFQQCGNALFGYQSLISGDSNAGNWGRRENGDIVLFDWERFGKGSPAIDLAPLIKGMGTKHSFLNLSERYCQLSYHQNSNALAREIAIAKAWIVTEVIVLLHRRQKTAFPIYLNWYREHLPDWLDNVEKML

SEQ ID NO: 1961 - protein, 76 aa, Kosakonia cowanii
MSLPWSIDDNRESGANGCRNPRSKNDLTRDIALAKAWIVSEVITLLHQRQKADFPRFQHWYRGYLPDWLKQIETVI

SEQ ID NO: 1962 - protein, 287 aa, Kosakonia cowanii
MAIFISLDGSVKNKILYLLSAFSAFPAAAQSPDEVVVTGGRYYAGSVFGQHDYAAHTNLTLKSFRIMRTEVTYRLYSAVHEWALERGYTFGVGCNGATYEDCLPADTDNGTHPVTSVEWSDAVIFANALSEKSGLRPVYLSKNGVPARDSSSYEFTQDARADGYRLPTAEEWHVAARGGKTGLMKAQYGFRFAGSNNQKAVAWFPDFNDPHFGTARVKSLRPNALGLYDMSGNVSEWIDASDTISGVKMYYFCGGSYLIHTGSLAGCDTHSAGYALPDTGFRLVRKF

SEQ ID NO: 1963 - protein, 261 aa, Kosakonia cowanii
MTTENLAQMGAARVVKRVNATGIVVIEKAPVSKVEYAFYHQVAPELNRAEILTPALLAADASTRALTLEAIPYPVSQQNVANDAIVSMLARLHRFAPDKNWHYHPHRWPDAQLELSLQLLALPEEAARVLRRCQRESDRLFAEAGLISGDSNAGNWGQRENGEFVLFDWERFSTGHPAIDLAPLIKGMGTPEEYRHLAARYCRFNPRSENDLARDIALAKAWIVSEVITLLHKRQKADFPRFQHWYRSYLPDWLREMEKMM

SEQ ID NO: 1964 - protein, 410 aa, Kosakonia cowanii
MSSSLPETRPRMGLLLNMALRDLIHDRKVALCIVFSLIAVIAPLLLLFGLKNGIVSQLRHDLLDDPRTREVRMTGNGNYDLAWLNALAARPEVGFSIPLTRSLNTQADLVRDGQHFAAGAEVIPSAKGDPLLRESGVLPHGSTVVLSNSAARKLDVKAGDTFRLFVSRKRDGQNQRTSLSVSVGAILDEARFARPALFVDLPLLVALEDYRDGFQVPLLGVTDGEKARERHNFARARLYAATLDDVVPLAQWLESQHIEAITQAAQIEAVRAIDRVLGVIFAVIAWISASGCIASLIGAFIANIDRKRKDMAVLRLLGFRRQAVTLFIMIQALCLTGVAFIAGLLIYGAGSALFNHLLGANLPESAFVCHLDPGHFAAAFLSVLAVALGVAAIGALRALKIEPAESLREI

SEQ ID NO: 1965 - protein, 261 aa, Kosakonia cowanii
MTAENLAQMGAARVVKRVNTAGITVIEKAPVSEVEYAFYHQVAPELNRAEILTPALLAADASSRALTLEAIPLPVSQENVACDAIVSMLARLHRFSPDRRWHYHQHGWPDAQLELSLHLLALPEEAARVLRRCQRDSDRLFAEAGLISGDSNAGNWGQRKNGEFVLFDWERFSTGHPAIDLAPLIKGMGTPEEYQRLAARYCRFNPRSENDLARDIALAKAWIVSEVITLLQQRQKADFPRFQHWYRCYLPDWLKQIETVI

SEQ ID NO: 1966 - protein, 261 aa, Kosakonia cowanii
MTTENLAQMGAARVVKRVNATGIAVIEKAPVSEVEYAFYHQVAPELNRAEILTPALLAADASTLALTLEAIPYPVSQQNVANDAIVSMLARLHRFAPDKNWHYHPHRWPDAQLALSLQLLALPEEAARVLRRCQRESDRLFAEAGLISGDSNAGNWGQRENGEFVLFDWERFSTGHPAIDLAPLIKGMGTPEEYRHLAARYCRFNPRSENDLARDIALAKAWIVSEVITLLHKRQKADFPRFQHWYRSYLPDWLKQTGTLI

SEQ ID NO: 1967 - protein, 261 aa, Kosakonia cowanii
MTTENLAQMGAARVVKRVNATGIAVIEKAPVSKVEYAFYHQVAPELNRAEILTPALLAADASTRALTLEAIPYPVSQQNVANDAIVSMLARLHRFAPDKNWNYHPHRWPDAQLELSLQLLALPEEAARVLRRCQRESDRLFAEAGLISGDSNAGNWGQRENGEFVLFDWERFSTGHPAIDLAPLIKGMGTPEEYRHLAARYCRFNPRSENDLARDIALAKAWIVSEVITLLHKRQKADFPRFQHWYRSYLPDWLREVEKMK

SEQ ID NO: 1968 - protein, 410 aa, Kosakonia cowanii
MSSSLPETRPGMGLLLNMALRDLIHDRKVALCIVFSLIAVIAPLLLLFGLKNGIVSQLRHDLLDDPRTREVRMTGNGNYDLAWLNALAARPEVGFSIPLTRSLNTQADLVRDGQHFAAGAEVIPSAKGDPLLRESGVLPHGSTVVLSHSAARKLDVKAGDTFRLFISRKRDGQNQRTSLSVSVGAILDEARFARPALFVDLPLLVALEDYRDGFQVPLLGVTDGENARERRNFARARLYAATLDDVAPLAQWLESQHIEAITQAAQIEAVRAIDRVLGVIFAVIAWISASGCIASLIGAFIANIDRKRKDMAVLRLLGFRRQAVTLFIMIQALCLTGVAFIAGLLIYGAGSALFNHLLGANLPESAFVCHLDPCHFAAAFLSVLAVALGVAAIGALRALKIEPAESLREI

SEQ ID NO: 1969 - protein, 261 aa, Kosakonia cowanii
MTTENLAQMGAARVVKRVNATGIAVIEKAPVSKVEYAFYHQVAPELNRAEILTPALLAADASTRALTLEAIPYPVSQQNVANDAIVSMLARLHRFAPDKNWHYHPHRWSDAQLALSLQLLALPEEAARVLRRCQRESDRLFAEAGLISGDSNAGNWGQRENGEFVLFDWERFSTGHPAIDLAPLIKGMGTPEEYRHLAARYCRFNPRSENDLARDIALAKAWIVSEVITLLHKRQKADFPRFQHWYRSYLPDWLKQTGILI

SEQ ID NO: 1970 - protein, 174 aa, Kosakonia cowanii
MLARLHRFAPDRNWHYHPHRWPDAQLELSLHLLALPEAAARALRRCQRDSDRLFAEAGLISGDSNAGNWGQRENGEFVLFDWERFSTGHPAIDLAPLIKGMGTPEEYRHLAARYCRFNPRSENDLTRDIALAKAWIVSEVITLLYKRQKADFPRFQHWYRSYLPDWLKEVEKIM

SEQ ID NO: 1971 - protein, 513 aa, Kosakonia cowanii
MKFNLLLTLAAAGLGFSCAANATWDEKFWNPKPLADDVILPLPCDGAMAFRKVAIPLDKPLADYSITLGEEGNEWGYIEQSRPDHIAGSFPQEKKEKGRYYLMAKYELTDLQYRALSGDCAKPDIKGRLPKVNIGWMDAMSIADKYNLWLRKEKPDALPQDDKQPGFLRLPTETEWEFAARGGLSVSSAEFRDRHFPMPEGLNGYVWFAGAQSANNKLQLTGLLKPNPLGLHDMLGNAGEMMFEPFRLNKLDRLHGKAGGYIVRGGSYLTPQADIRSSLRGEEPYYTAQGENSSKANGMRLVLVSTTLTSRDRIKEIEKEWQALGTESKAAKKPGEGADSLQNLNAISAKVQDEGVKKELESLRNELRANSQLRDEQRDQAIRTSLQLGAFLCTKMKDDGEFLDRLNQLYGKTCAAGSQLDANCSRRQEQLDQHKKALEFITSYYADTLVDMGTTYNKSLIDPQMTVVQQQMAARGKTNLNGYLNTYWGNLQGYWKDGKVARDAWLSACKKNN

SEQ ID NO: 1972 - protein, 261 aa, Kosakonia cowanii
MTTENLAQMGAARVVKRVNATGIAVIEKAPVSKVEYAFYHQVAPELNRAEILTPALLAADASTRALTLEAIPYPVSQQNVANDAIVSMLARLHRFAPDKNWHYHPHRWPDAQLALSLQLLALPEEAARVLRRCQRESDRLFAEAGLISGDSNAGNWGQRENGEFVLFDWERFSTGHPAIDLAPLIKGMGTPEEYRHLAARYCRFNPRSENDLARDIALAKAWIVSEVITLLHKRQKADFPRFQHWYRSYLPDWLREMEKMM

SEQ ID NO: 1973 - protein, 410 aa, Kosakonia cowanii
MSSSLPETRPRMGLLLNMALRDLIHDRKVALCIVFSLIAVIAPLLLLFGLKNGIVSQLRHDLLDDPRTREVRMTGNGNYDLAWLNALAARPEVGFSIPLTRSLNTQADLVRDGQHFAAGAEVIPSAKGDPLLRESGVLPHGSTVVLSNSAARKLDVKAGDTFRLFISRKRDGQNQRTSLSVSVGAILDEARFARPALFVDLPLLVALEDYRDGFQVPLLGVTDGENARERHNFARARLYAATLDDVAPLAQWLESQHIEAITQAAQIEAVRAIDRVLGVIFAVIAWISASGCIASLIGAFIANIDRKRKDMAVLRLLGFRRQAVTLFIMIQALCLTGVAFIAGLLIYGAGSTLFNYLLGANLPESAFVCHLDPGHFAAAFLSVLAVALGVAAIGALRALKIEPAESLREI

SEQ ID NO: 1974 - protein, 261 aa, Kosakonia cowanii
MTTKDLAQMGAARVVKRVNTAGITVIEKAPVSEVEYAFYHQVAPELNRAKILTPALLAADASTRALTLEAIPYPVSQQNVTCDAIVSMLARLHRFSPDSNWHYHTHRWPDAQLELSLHLLALPEAAARALRRCQRDSDRLFAEAGLISGDSNAGNWGQRENGEFVLFDWERFSTGHPAIDLAPLIKGMGTPEEYRHLAARYCRFNPRSENDLVRDIALAKAWIVSEVITLLHQRQKADFPRFQHWYRCYLPDWLKQIETVI

SEQ ID NO: 1975 - protein, 261 aa, Kosakonia cowanii
MTTENLAQMGAARVVKRVNATGIAVIEKAPVSKVEYAFYHQVAPELNRAEILTPALLAADASTRALTLEAIPYPVSQQNVANDAIVSMLARLHRFAPDKNWNYHPHRWPDAQLALSLQLLALPEEAASVLRRCQRESDRLFAEAGLISGDSNAGNWGQRENGEFVLFDWERFSTGHPAIDLAPLIKGMGTPEEYRHLAARYCRFNPRSENDLARDIALAKAWIVSEVITLLHKRQKADFPRFQHWYRSYLPDWLREVEKMK

SEQ ID NO: 1976 - protein, 650 aa, Kosakonia cowanii
MKTRVWLGGFLCLTAATMGAHAADQKPLLQEGKHSLYQRVLTYPGCQLAPKAGEAGKEQPAFSRFYVYQRSKQGQDEWLQVGPDSFGHVSGWLKAACTVDWKMQLTLAFTNPSGRHPMLFFRDKSDVESLLNNPKPAAALDPLLANLKSNKPVPQVLAKEPDYMVDQQKNFYLLPVLGSDDVFTDSGFQVRVLNVASVSEKAPEKAAKAADEKNMMKGFSASVVFVIDSTISMGPYIDRTKEAIDKIYQRIEKEHLQDQVKFGLVAFRSNVKAVPGLEYDSKMYVDPNTVKDGKDFLAKVHDLKQATVSSSKVDEDAYGGVMTALDKVDWTQFGARYVILITDAGALEGGDNLSSTHLDAAQVRQEAAYRGVALYTLHLKTPSGKKNHAAAEAQYQDLTLNPFLHKPLYYPIDSGDVNNFGTMVDSLANAITGQIKTAWSGEETAGSALGASEEYAGKKADPLLSDADKLSKAMRLAYLGEKQGTQAPPVFKSWISDRDLVNQNIPATEVRVLLTKSELSDLSDVMKKIVNAANEGLISPDDMFASLRSLAATMGNDPNQAKSKNATRLGELGLLGEYIEGLPYLSEVLSLDEETWKSWDGLEQERFIRRLNTKLNYYQRYNQDVDRWISLAPDSDPRDNVYPVPLENLP

SEQ ID NO: 1977 - protein, 261 aa, Kosakonia cowanii
MTTKDLAQMGAARVVKRVNAAGIMVIEKAPVSEVEYAFYHQVAPELNRAEILTPALLAADASSRALTLEAIPYPVSQQNVTCDAIVSMLARLHRFSPDSHWHYHAHRWPDAQLELSLHLLALPEEAARALRRCQRDSDRLFAEAGLISGDSNAGNWGQRENGEFVLFDWERFSTGHPAIDLAPLIKGMGSPEEYQRLAARYCRFNPRSENDLVRDIALAKAWIVSEVITLLHQRQKADFPRFQHWYRYYLPDWLKQIETVI

SEQ ID NO: 1978 - protein, 261 aa, Kosakonia cowanii
MTTENLAQMGAARVVKRINAAGITVIEKAPVSEVEYAFYHQVAPELNRAEILTPALVGSDASSRALTLEAIPYPVSQQNVANDAIVSMLARLHRFAPDSNWHYHTHRWPDEQLELSLHLLALPEEAARALRRCQRDSDRLFAEAGPISGDSNAGNWGQRENGEFVLFDWERFSTGHPAIDLAPLIKGMGTPEEYQRLAARYCRFNPRSENDLARDIALAKAWIVSEVITLLHQRQKADFPRFQHWYRCYLPDWLKQIETVI

SEQ ID NO: 1979 - protein, 261 aa, Kosakonia cowanii
MTTENLAQMGAARVVKRVNATGIAVIEKVPVSKVEYAFYHQVAPELNRAEILTPALLAADASTRALTLEAIPYPVSQQNVANDAIVSMLARLHRFAPDKNWHYHPHRWPDAQLALSLQLLALPGEAARVLRRCQRESDRLFAEAGLISGDSNAGNWGQRENGEFVLFDWERFSTGHPAIDLAPLIKGMGTPEEYRHLAARYCRFNPRSENDLARDIALAKAWIVSEVITLLHKRQKADFPRFQHWYRSYLPDWLREVEKMK

SEQ ID NO: 1980 - protein, 513 aa, Kosakonia cowanii
MKFNLLLTLAAAGLGFSCAANATWDEKFWNPKPLADDVILPLPCDGAMAFRKVAIPLDKPLADYSITLGEEGNEWGYIEQSRPDHIAGSFPQEKKEKGRYYLMAKYELTDLQYRALSGDCAKPDIKGRLPKVNIGWMDAMSIADKYNLWLRKEKPDALPQDDKQPGFLRLPTETEWEFAARGGLSVSSAEFRDRHFPMPEGLNGYVWFAGAQSANNKLQLTGLLKPNPLGLHDMLGNVGEMMFEPFRLNKLDRLHGKAGGYIVRGGSYLTPQADIRSSLRGEEPYYTAQGENSSKANGMRLVLVSTTLTSRDRIKEIEKEWQALGTESKAAKKPGEGADSLQNLNAISAKVQDEGVKKELESLRNELRANSQLRDEQRDQAIRTSLQLGAFLCTKMKDDGEFLDRLNQLYSKTCAAGSQLDANCSRRQEQLDQHKKALEFITSYYADTLVDMGTTFNKSLIDPQMTVVQQQMAARGKTNLNGYLNTYWGNLQGYWKDGKVARDAWLSACKKNN

SEQ ID NO: 1981 - protein, 650 aa, Kosakonia cowanii
MKTRVWLGGFLCLTTATMGAHAADQKPLLQEGKHSLYQRVLTYPGCQLAPKAGEAGKEQPAFSRFYVYQRSKQGQDEWLQVGPDSFGHVSGWLKAACTVDWKMQLTLAFTNPAGRHPMLFFRDKSDVESLLNNPKPAAALDPLLANLKSNKPVPQVLAKEPDYMVDQQKNFYLLPVLGSDDVFTDSGFQVRVLNVASVSEKAPEKAAKAADEKNMMKGFSASVVFVIDSTISMGPYIDRTKEAIDKIYQRIEKEHLQDQVKFGLVAFRSNVKAVPGLEYDSKMYVDPNTVKDGKDFLAKVHDLKQATVSSSKVDEDAYGGVMTALDKVDWTQFGARYVILITDAGALEGGDNLSSTHLDAAQVRQEAAYRGVALYTLHLKTPSGKKNHAAAEAQYQDLTLNPFLHKPLYYPIDSGDVNNFGTMVDSLANAITGQIKTAWSGEETAGSALGASEEYAGKKADPLLSDADKLSKAMRLAYLGEKQGTQAPPVFKSWISDRDLVNQNIPATEVRVLLTKSELSDLSDVMKKIVNAANEGLISPDDMFASLRSLAATMGNDPNQAKSKNATRLGELGLLGEYIEGLPYLSEVLSLDEETWKSWDGLEQERFIRRLNTKLNYYQRYNQDVDRWISLAPDSDPRDNVYPVPLENLP

SEQ ID NO: 1982 - protein, 468 aa, Kosakonia cowanii
MKEMFLCSDKLNKYQSMGENGQAVHISALQLRETLRLRKQSAAADVLAIPQISEHGERVDWYAPFSGDVIPWSAATESERQSALAQLEITQATLRQLSQDFAQSNQPEQQLFGKLLEKTLQFPDPEHVWLVNGKPVISFWGFVNARHQARIDPLDCLRPPKPVTPAAPLHSAPPVNEPLVTQPKRRGWWILPAWLCWLLPLLLLALLLLWLLRGCVPGVTIPGFSVEKPALPDVHLPVAENGATLPVTSSERIVGTTEGVTAPVVSGSTTGIVPLSDEERATAAPENAAALNDPAVPVAPETGSEPAQAGVEPVTPEAQVNDPALAEPNATAGNATAPVEVKNPLSLPPEALAQGRTDFLNGQWRAGAGIQDQRTGKPLSLNYQIKDGKGEVQMVRGDGVSCRGAVNAAIQAGKLAINNQGEAQCTDGSVYQMPEIVCAPGAKSVADCKGSYGTSTLFPLSMKQEASN

SEQ ID NO: 1983 - protein, 1000 aa, Kosakonia cowanii
MLAELTDFKKQVKLIRDSGIQFLDFAFSLPARKAYGEFLRQQGEGAVLRLIYNERDDKFQVPTPDGETPRNAEPEYALAIEDSLSLYAGIWLPLPFFRFNPPGGFSHGPTNWSRVQFHQLPEPDEKGNTWRATLIFDTKIFPDREHTQYLAPGEDDVRSGAGFALACLPHQMGDFLTLPWIEEWLNDIYTRQAHAVLRQHPEDTEEKLGLKEHQAHFLNLLEVLKKTIAIPEVQLNDVKIRDTAIPVDLVLDIGNSRSCGVLIEEHAADNKGLSQLYQLQLRDLSQPQFVYNEPFESRLEFAQAEFGKQDFSSKSGRSDAFTWPTIGRVGGEAFRMAAQRLGTEGSTGLSSPKRYLWDDQPYSPGWRFSQAFVKSDREPLATAAPLLYMLNDHGKLLIRLNEDERMPVFSPVYSRSSLMTMMLSEVLSQALMQINSPAQRLKMSHASHPRRLRNVILTVPPAMPKPERAIFEACMHDAIRLVWKSLEWEEMDYDGEESGNAKQPHPGVHVKWDEATCGQLVYLYNETQTNFGGRTDEFFAATRRPDNQQAEGEQRSLKIASIDIGGGTTDLVITRYTLDDGKGINVRITPKQLFREGFKVAGDDILLDVIRLYLQPAVKAAMMKVGHSDIAAESMMSQLFGSEAIEAGKQVLRQQLTLQIFSPLALAILHRYEEYKPESGREVLNYTFRELLTGTTPTAKVQDYVNDVVRTGQLASEALFSLLDVPLEVDLARLHNEFIDPRSGRMNICHSLRALCEVLWHYNCDVLLLTGRPSRLPGIQALIRQLQPVPPTRVLPLHGYETGGWYPFNKKGCIDDPKSTAVVGAMLCLLAEKSRLNNFYFRAANFTAYSTIRYLGMLDGNNVIKDSNVFYSDIDLDAADFQLPQGQPFEARGEVRIGFRQLDNERWPASSLYTLKINNPNLASELAGDAVMRIELMAEQGRARNGEEAVSPERFRIESLEMENARRNYSRKDVTFQLNTMVGNGMGESQYWLDSGSIKS

SEQ ID NO: 1984 - protein, 888 aa, Kosakonia cowanii
MNSINSKQIIQGWQGVERGAGEAIEWINAVRQDAPRLNTEADRLTINLRRSRNKARRLALAAAKPMTIGFFGLSQAGKSYLISALAAGENGKLETRLGGKQLDFLTHINPPGGGKEATGLVTRFSRRQVGGDERWPVTLQLFSEIEMGKILANAFIHDFNQEKFDWQYDEGRISDLLNSLAKRRRPTRVAGISEDDVVSLWDYLSRHAEKSQSRLALHYWPQAITLAPWLTPEDRGQLFSVLWGEVAELTEAYIRFAQTLHRLGGAQEVWAPLSTLVSEENGLLVQRDSIMNVDMLERLNKETDIRIEVCPVVEGQAAAPVTLSLAELTALTVELHIPLVASTREPLFETVDLLDFPGYRGRLGVESMDDIRRAVNSEESNPLAQLILRGKVAYLFERYTENQEMNVLVVCTASTKQSDVKEVGGVLDEWIRYTQGADAEARGRRLPGLIWALTMFDLRISQGLSQEEAILRQSWGLGGMIKMAMTERFGQYKWMQEWQRGQAFNNTFLVRKPRQQTPFIRISDGNEAAFSEENLPQLQLMRKTFLEDEAVNRYIASPDEAWDAMLELNDGGMRRMADYLSTVARPEVKLERIAEQLQEIRDELIEGGLGNWYQPDGEEDAAKKAQIARDILDVLKKRSGMHGELLLRLVPTRRDLQALYLQQTTLPVQEEAPEELDIFDIGVGAAFGAEAPAATTYSHEIAFAHQSVQHWINHLRGLSESPALLNYINLPRPIIDALADELITALLRLRVEEKLVEAMTNTEQAGVLLEQMVDRQVSRILHVMGDFITWLGYLEMPAAKRPTRLNMPDQHIFTRPSQCDSVVWKDDERLARLTPQQLNYTAMFIIDWLVGLESLITENAGHSAGREISVAQNEKLGAIIRQIQTSQE

SEQ ID NO: 1985 - protein, 1000 aa, Kosakonia cowanii
MLAELTDFKKQVKLIRDSGIQFLDFAFSLPARKAYGEFLRQQGEGAVLRLIYNERDDKFQVPTPDGETPRNAEPEYALAIEDSLSLYAGIWLPLPFFRFNPPGGFSHGPTNWSRVQFHQLPEPDEKGNTWRATLIFDTKIFPDREHTQYLAPGEDDVRSGAGFALACLPHQMGDFLTLPWIEEWLNDIYTRQAHAVLRQHPEDTEEKLGLKEHQAHFLNLLEVLKKTIAIPEVQLNDVKIRDTAIPVDLVLDIGNSRSCGVLIEEHAADNKGLSQLYQLQLRDLSQPQFVYNEPFESRLEFAQAEFGKQDFSSKSGRSDAFTWPTIGRVGGEAFRMAAQRLGTEGSTGLSSPKRYLWDDQPYSPGWRFSQAFVKSDREPLATAAPLLYMLNDHGKLLIRLNEDERMPVFSPVYSRSSLMTMMLSEVLSQALMQINSPAQRLKMSHASHPRRLRNVILTVPPAMPKPERAIFEACMHDAIRLVWKSLEWEEMDYDGEESGNAKQPHPGVHVKWDEATCGQLVYLYNETQTNFGGRTDEFFAATRRPDNQQAEGEQRSLKIASIDIGGGTTDLVITRYTLDDGKGINVRITPKQLFREGFKVAGDDILLDVIRLYLQPAVKAAMMKVGHSDIAAESMMSQLFGSEAIEAGKQVLRQQLTLQIFSPLALAILHRYEEYKPESGREVLNYTFRELLTGTTPTAKVQDYVNDVVRTGQLANEAPFSLLDVPLEVDLARLHNEFIDPRSGRMNICHSLRALCEVLWHYNCDVLLLTGRPSRLPGIQALIRQLQPVPPTRVLPLHGYETGGWYPFNKKGCIDDPKSTAVVGAMLCLLAEKSRLNNFYFRAANFTAYSTIRYLGMLDGNNVIKDSNVFYSDIDLDAADFQLPQGLPFEARGEVRIGFRQLDNERWPASSLYTLKINNPNLASELAGDAVMRIELMAEQGRARNGEEAVSPERFRIESLEMENARRNYSRKDVTFQLNTMVGNGMGESQYWLDSGSIKS

SEQ ID NO: 1986 - protein, 365 aa, Kosakonia cowanii
MKIWLNGERVTKVNLTGDTMVITWTPRDRATGAPLQKTPAQRQIESHFPELASGMHLPKFARVMAASEPASSGNFADPFRPRYAVDVQLLDADGKPDSGTPVYSAVPLPVPMAGNDSGMFQFPPEGTLVEVAFTGGRPDKPFVRQTVPEGTSLPDVKPGEQLQQQRAEVSQRVTQGGDWERQTDQSIRETSMSRHVQADTETREMVTRDTTIKATDKTTVLGTATLMAGHIQHVTSGDYAMATGGKYVASVAGDAETEIAGKQSTKVTGGISIETSGALTEKIAAQRKSVAAGGQQLMGTTVHIGSESINALTMMLDTIDLLSELAQQCASHTHPGTGAPASASAFTQVAARAGQTRSKYQKLIA

SEQ ID NO: 1987 - protein, 426 aa, Kosakonia cowanii
MIRITRIVKPSVELTDYATSFSPFRTLLETYLPASIQNLYARPVIADDGAVEWYSDINGQPRRLLDLSETEQSRARAVLEQRLDSVRALHQKLAQSGSEPETMLRLLQAASHSPAPEQVWVIDGHPVIVPPAEGTPHAAAAATTAAAVSSRRWWPWLLLLALLIALILLLLSRCSPLHETAAPVTPAPPAVTPGEPVKPETAPAPQAPVKPTKAVCPAQRTQQQAPEMVVIMDASGSMAITMDATQDELISWNQGKYVENIEREPRRISLARNAAKGIIDTIPRDMNISLVAAENCRQVSLSPSFPFAQRSALKKRIEGIQPVGKTPLAEALALAGKKVDGVNRDAIILLVSDGDETCGGDPCQVARELKKSKPRLQVNVVDIMSTGAGNCIASSTGGKVFAVNNTREFKQIMKKAMQEYIPEGCE

SEQ ID NO: 1988 - protein, 468 aa, Kosakonia cowanii
MKEMFLCSDKLNKYQSMGENGQAVHISALQLRETLRLRKQGAAADVLAIPQISEHGERIDWYAPFPGDVIPWSAATESERQSALAQLETTQATLRQLSQDFAQSNQPEQQLFGKLLEKTLQFPDPEHVWLVNGKPVISFWGFVNARHQARIDPLDCLRPPKPVTPAAPQHSAPPINEPVVTPPKRRGWWILPAWLCWLLPLLLLALLLLWLLRGCVPGVTIPGFSVEQPALPDAHLPVAENGATLPVTSSERVVGTTEGVTAPVVSGSTTGIGPLSDEERATATPENAAALNDPAVPVAPETGSEPAQAGVEPVTPEAQVNDPALAEPNATAGNATAPVEVKNPLSLPPEALAQGRTDFLNGQWRAGAGIQDQRTGKPLSLNYQIKDGKGEVQMVRGDGVSCRGAVNAAIQAGKLAINNQGEAQCTDGSVYQMPEIVCAPGAKSVADCKGSYGTSTLFPLSMKQEASN

SEQ ID NO: 1989 - protein, 888 aa, Kosakonia cowanii
MNSINSKQIIQGWQGVERGAGEAIEWINAVRQDAPRLNTEADRLTINLRRSRNKARRLALAAAKPMTIGFFGLSQAGKSYLISALAAGENGKLETRLGGKQLDFLTHINPPGGGKEATGLVTRFSRRQVGGDERWPVTLQLFSEIEMGKILANAFIHDFNQEKFDWQYDEGRINDLLASLTKRRRPTRVAGISEDDVVSLWDYLSRHAEKSQSRLALHYWPQAITLAPWLTPEDRGQLFSVLWGEVAELTEAYIRFAQTLHRLGGAQEVWAPLSTLVSEENGLLVQRDSIMNVDMLERLNKETDIRIEVCPVVEGQAAASVTLSLAELTALTVELHIPLVASTREPLFETVDLLDFPGYRGRLGVESMDDIRRAVNSEESNPLAQLILRGKVAYLFERYTENQEMNVLVVCTASTKQSDVKEVGGVLDEWIRYTQGADAEARGRRLPGLIWALTMFDLRISQGLSQEEAILRQSWGLGGMIKMAMTERFGQYKWMQEWQRGQAFNNTFLVRKPRQQTPFIRISDGNEAAFSEENLPQLQLMRKTFLEDEAVNRYIASPDEAWDAMLELNDGGMRRMADYLSTVARPEVKLERIAEQLQEIRDELIEGGLGNWYQPDGEEDAAKKAQIARDILDVLKKRSGMHGELLLRLVPTRRDLQALYLQQTTLPVQEETPEELDIFDIGVGAAFGAEAPAATTYSHEIAFAHQSVQHWINHLRGLSESPALLNYINLPRPIIDALADELITALLRLRIEEKLVEVMTNTEQAGVLLEQMVDRQVSRILHVMGDFITWLGYLEMPAAKRPTRLNMPEQHIFTRPSQCDSVVWKDDERLARLTPQQLNYTAMFIIDWLVGLESLITENAGHSAGREISVAQNEKLGAIIRQIQTSQE

SEQ ID NO: 1990 - protein, 426 aa, Kosakonia cowanii
MIRITRIVKPSVELTDYAASFSPFRTLLETYLPASIQNLYARPVIADDGAVEWYSDINGQPRRLLDLSETEQSRARAVLEQRLDSVRALHQKLAQSGSEPETMLRLLQAATHSPAPEQVWVIDGHPVIVPPAEGAPRAAAAAATAAAVSRRRWWPWLLLLALLIALILLLLSRCSPLHETAAPVTPVPPAVTPGEPVKPETTPAPHAPVKPTKAVCPAQRTQQQAPEMVVIMDASGSMAITMDATQDELISWNQGKYVENIEREPRRISLARNAAKGIIDTIPRDMNISLVAAENCRQVSLSPSFPFAQRSALKKRIEGIQPVGKTPLAEALALAGKKVDGVNRDAIILLVSDGDETCGGDPCQVARELKKSKPRLQVNVVDIMSTGAGNCIASSTGGKVFAVNNTREFKQIMKKAMQEYIPEGCE

SEQ ID NO: 1991 - protein, 426 aa, Kosakonia cowanii
MIRITRIVKPSVELTDYAASFSPFRTLLETYLPASIQNLYARPVIADDGAVEWYSDINGQPRRLLDLSETEQSRARAVLEQRLDSVRALHQKLAQSGSEPETMLRLLQAATHSPAPEQVWVIDGHPVIVPPAEGAPRAAAAATTAAAVSSRRWWPWLLLLALLIALILLLLSRCSPLHETAAPVTPAPPAVTPGEPVKPEKTPAPHAPVKPTKAVCPAQRTQQQAPEMVVIMDASGSMAITMDATQDELISWNQGKYVENIEREPRRISLARNAAKGIIDTIPRDMNISLVAAENCRQVSLSPSFPFAQRSALKKRIEGIQPVGKTPLAEALALSGKKVDGVNRDAIILLVSDGDETCGGDPCQVARELKKSKPRLQVNVVDIMSTGAGNCIASSTGGKVFAVNNTREFKQIMKKAMQEYIPEGCE

SEQ ID NO: 1992 - protein, 426 aa, Kosakonia cowanii
MIRITRIVKPSVELTDYAASFSPFRTLLETYLPASIQNLYARPVIADDGAVEWYSDINGQPRRLLDLSETEQSRARTVLEQRLDSVRALHQKLAQNGSEPETMLRLLQAATHSPAPEQVWVIDGHPVIVPPAEGAPRAAAAATTAAAVSRRRWWPWLLLLALLIALILLLLSRCSPLHETAAPVTPVPPAVTPGEPVKPETTPAPHAPVKPTKAVCPAQRTQQQAPEMVVIMDASGSMAITMDATQDELISWNQGKYVENIEREPRRISLARNAAKGIIDTIPRDMNISLVAAENCRQVSLSPSFPFAQRSALKKRIEGIQPVGKTPLAEALALAGKKVDGVNRDAIILLVSDGDETCGGDPCQVARELKKSKPRLQVNVVDIMSTGAGNCIASSTGGKVFAVNNTREFKQIMKKAMQEYIPEGCE

SEQ ID NO: 1993 - protein, 468 aa, Kosakonia cowanii
MKEMFLCSDKLNKYQSMGENGQAVHISALQLRETLRLRKQSAAADVLAIPQISEHGERVDWYAPFSGDVIPWSAATESERQSALAQLETTQATLRQLSQDFAQSNQPEQQLFGKLLEKTLQFPDPEHVWLVNGKPVISFWGFVNARHQARIDPLDCLRPPKPVTPAAPLHSAPPVNEPLVTPPKRRGWWILPAWLCWLLPLLLLALLLLWLLRGCVPGVTIPGFSVEKPALPDVHLPVAENGATLPVTSSERVVGTTEGVTAPVVNGSTTGIGTLSDEERATAAPENAAALNDPAVPVAPETGSEPAQAGVEPVTPEAQVNDPALAEPNATAGNATAPVEVKNPLSLPPEALAQGRTDFLNGQWRAGAGIQDQRTGKPLSLNYQIKDGKGEVQMVRGDGVSCRGAVNAAIQAGKLAINNQGEAQCTDGSVYQMPEIVCAPGAKSVADCKGSYGTSTLFPLSMKQEASN

SEQ ID NO: 1994 - protein, 1000 aa, Kosakonia cowanii
MLAELTDFKKQVKLIRDSGIQFLDFAFSLPARKAYGEFLRQQGEGAVLRLIYNERDDKFQVPTPDGETPRNAEPEYALAIEDSLSLYAGIWLPLPFFRFNPPGGFSHGPTNWSRVQFHQLPEPDEKGNTWRATLIFDTKIFPDREHTQYLAPGEDDVRSGAGFALACLPHQMGDFLTLPWIEEWLNDIYTRQAHAVLRQHPEDTEEKLVLKEHQAHFLNLLEVLKKTIAIPEVQLNDVKIRDTAIPVDLVLDIGNSRSCGVLIEEHAADNKGLSQLYQLQLRDLSQPQFVYNEPFESRLEFAQAEFGKQDFSSKSGRSDAFTWPTIGRVGGEAFRMAAQRLGTEGSTGLSSPKRYLWDDQPYSPGWRFSQAFVKSDREPLATAAPLLYMLNDHGKLLIRLNEDERMPVFSPVYSRSSLMTMMLSEVLSQALMQINSPAQRLKMSHASHPRRLRNVILTVPPAMPKPERAIFEACMHDAIRLVWKSLEWEEMDYDGEESGNAKQPHPGVHVKWDEATCGQLVYLYNETQTNFGGRTDEFFAATRRPDNQQAEGEQRSLKIASIDIGGGTTDLVITRYTLDDGKGINVRITPKQLFREGFKVAGDDILLDVIRLYLQPAVKAAMMKVGHSDIAAESMMSQLFGSEAIEAGKQVLRQQLTLQIFSPLALAILHRYEEYKPESGREVLNYTFRELLTGTTPTAKVQDYVNDVVRTGQLASEALFSLLDVPLEVDLARLHNEFIDPRSGRMNICHSLRALCEVLWHYNCDVLLLTGRPSRLPGIQALIRQLQPVPPTRVLPLHGYETGGWYPFNKKGCIDDPKSTAVVGAMLCLLAEKSRLNNFYFRAANFTAYSTIRYLGMLDGNNVIKDSNVFYSDIDLDAADFQLPQSQPFEARGEVRIGFRQLDNERWPASSLYTLKINNPNLASELAGDAVMRIELMAEQGRARNGEEAVSPERFRIESLEMEHARRNYSRKDVTFQLNTMVGNGMGESQYWLDSGSIKS

SEQ ID NO: 1995 - protein, 888 aa, Kosakonia cowanii
MNSINSKQIIQGWQGVERGAGEAIEWINAVRQDAPRLNTEADRLTINLRRSRNKARRLALAAAKPMTIGFFGLSQAGKSYLISALAAGENGKLETRLGGKQLDFLTHINPPGGGKEATGLVTRFSRRQVGGDERWPVTLQLFSEIEMGKILANAFIHDFNQEKFDWQYDEGRISDLLNSLTKRRRPTRVAGISEDDVVSLWDYLSRHAEKSQSRLALHYWPQAITLAPWLTPEDRGQLFSVLWGEVAELTEAYIRFAQTLHRLGGAQEVWAPLSTLVSEENGLLVQRDSIMNVDMLERLNKETDIRIEVCPVVEGQAAAPVTLSLAELTALTVELHIPLVASTREPLFETVDLLDFPGYRGRLGVESMDDIRRAVNSEESNPLAQLILRGKVAYLFERYTENQEMNVLVVCTASTKQSDVKEVGGVLDEWIRYTQGADAEARGRRLPGLIWALTMFDLRISQGLSQEEAILRQSWGLGGMIKMAMTERFGQYKWMQEWQRGQAFNNTFLVRKPRQQTPFIRISDGNEAAFSEENLPQLQLMRKTFLEDEAVNRYIASPDEAWDAMLELNDGGMRRMADYLSTVARPEVKLERIAEQLQEIRDELIEGGLGNWYQPDGEEDAAKKAQIARDILDVLKKRSGMHGELLLRLVPTRRDLQALYLQQTTLPVQEEAPEELDIFDIGVGAAFGAEAPAATTYSHEIAFAHQSVQHWINHLRGLSESPALLNYINLPRPIIDALADELITALLRLRVEEKLVEAMTNTEQAGVLLEQMVDRQVSRILHVMGDFITWLGYLEMPAAKRPTRLNMPDQHIFTRPSQCDSVVWKDDERLARLTPQQLNYTAMFIIDWLVGLESLITENAGHSAGREISVAQNEKLGAIIRQIQTSQE

SEQ ID NO: 1996 - protein, 426 aa, Kosakonia cowanii
MIRITRIVKPSVELTDYATSFSPFRTLLETYLPASIQNLYARPVIADDGAVEWYSDINGQPRRLLDLSETEQSRARAVLEQRLDSVRALHQKLAQSGSEPETMLRLLQAASHSPAPEQVWVIDGHPVIVPPAEGTPRAAAAATTAAAVSSRRWWPWLLLLALLIALILLLLSRCSPLHETAAPVTPAPPAVTPGEPVKPETAPAPQAPVKPTKAVCPAQRTQQQAPEMVVIMDASGSMAITMDATQDELISWNQGKYVENIEREPRRISLARNAAKGIIDTIPRDMNISLVAAENCRQVSLSPSFPFAQRSALKKRIEGIQPVGKTPLAEALALAGKKVDGVNRDAIILLVSDGDETCGGDPCQVARELKKSKPRLQVNVVDIMSTGAGNCIASSTGGKVFAVNNTREFKQIMKKAMQEYIPEGCE

SEQ ID NO: 1997 - protein, 468 aa, Kosakonia cowanii
MKEMFLCSDKLNKYQSMGENGQAVHISALQLRETLRLRKQGAAADVLAIPQISEHGERIDWYAPFPGDVIPWSAATESERQSALAQLETTQATLRQLSQDFAQSNQPEQQLFGKLLEKTLQFPDPEHVWLVNGKPVISFWGFVNARHQARIDPLDCLRPPKPVTPAAPQHSAPPINEPVVTPPKRRGWWILPAWLCWLLPLLLLALLLLWLLRGCVPGVTIPGFSVEQPALPDAHLPVAENGATLPVTSSERVVGTTEGVTAPAVSGSTTGIGPLSDEEGATATLENAAALNDPAVPVAPETGSEPTQAGVEPVTPEAQVNDPALAEPNATAGNATAPVEVKNPLSLPPEALAQGRTDFLNGQWRAGAGIQDQRTGKPLSLNYQIKDGKGEVQMVRGDGVSCRGAVNAAIQAGKLAINNQGEAQCTDGSVYQMPEIVCAPGAKSVADCKGSYGTSTLFPLSMKQEASN

SEQ ID NO: 1998 - protein, 888 aa, Kosakonia cowanii
MNSINSKQIIQGWQGVERGAGEAIEWINAVRQDAPRLNTEADRLTINLRRSRNKARRLALAAAKPMTIGFFGLSQAGKSYLISALAAGENGKLETRLGGKQLDFLTHINPPGGGKEATGLVTRFSRRQVGGDERWPVTLQLFSEIEMGKILANAFIHDFNQEKFDWQYDEGRINDLLASLTKRRRPTRVAGISEDDVVSLWDYLSRHAEKSQSRLALHYWPQAITLAPWLTPEDRGQLFSVLWGEVAELTEAYIRFAQTLHRLGGAQEVWAPLSTLVSEENGLLVQRDSIMNVDMLERLNKETDIRIEVCPVVEGLAAAPVTLSLAELTALTVELHIPLVASTREPLFETVDLLDFPGYRGRLGVESMDDIRRAVNSEESNPLAQLILRGKVAYLFERYTENQEMNVLVVCTASTKQSDVKEVGGVLDEWIRYTQGADAEARGRRLPGLIWALTMFDLRISQGLSQEEAILRQSWGLGGMIKMAMTERFGQYKWMQEWQRGQAFNNTFLVRKPRQQTPFIRISDGNEAAFSEENLPQLQLMRKTFLEDEAVNRYIASPDEAWDAMLELNDGGMRRMADYLSTVARPEVKLERIAEQLQEIRDELIEGGLGNWYQPDGEEDAAKKAQIARDILDVLKKRSGMHGELLLRLVPTRRDLQALYLQQTTLPVQEETPEELDIFDIGVGAAFGAEAPAATTYSHEIAFAHQSVQHWINHLRGLSESPALLNYINLPRPIIDALADELITALLRLRVEEKLVEAMTNTEQAGVLLEQMVDRQVSRILHVMGDFITWLGYLEIPAAKRPTRLNMPDQHIFTRPSQCDSVVWKDDERLARLTPQQLNYTAMFIIDWLVGLESLITENAGHSAGREISVAQNEKLGAIIRQIQTSQE

SEQ ID NO: 1999 - protein, 424 aa, Kosakonia cowanii
MIRITRIVKPSVELTDYAASFSPFRTLLETYLPASIQNLYARPVIADDGAVEWYSDINGQPRRLLDLSETEQSRARALLEQRLDSVRALHQKLAQSGSKPETMLRLLQAATHSPAPEQVWVIDGHPVIVPPAEGAPRAAAAAATAVSRRRWWPWLLLLALLIALILLLLSRCSPLHETAAPVTPVPPTVTPEEPVKPETTPAPHAPVKPTKAVCPAQRTQQQAPEMVVIMDASGSMAITMDATQDELISWNQGKYVENIEREPRRISLARNAAKGIIDTIPRDMNISLVAAENCRQVSLSPSFPFAQRSALKKRIEGIQPVGKTPLAEALALAGKKVDGVNRDAIILLVSDGDETCGGDPCQVARELKKSKPRLQVNVVDIMSTGAGNCIASSTGGKVFAVNNTREFKQIMKKAMQEYIPEGCE

SEQ ID NO: 2000 - protein, 468 aa, Kosakonia cowanii
MKEMFLCSDKLNKYQSMGENGQAVHISALQLRETLRLRKQSTAADVLAIPQISEHGERVDWYAPFSGDVIPWSAATESERQSALAQLETTQATLRQLSQDFAQSNQPEQQLFGKLLEKTLQFPDPEHVWLVNGKPVISFWGFVNARHQARIDPLDCLRPPKPVTPAAPLHSAPPVNEPLVTPPKRRGWWILPAWLCWLLPLLLLALLLLWLLRGCVPGVTIPGFSVEKPALPDVHLPVAENGATLPVTSSERVVGTTEGVTAPVVSGSTTGIGPLSDEERATAAPENAAALNDPAVPVAPETGSEPAQAGVEPVTPEAQVNDPALAEPNATAGNATAPVEVKNPLSLPPEALAQGRTDFLNGQWRAGAGIQDQRTGKPLSLNYQIKDGKGEVQMVRGDGVSCRGAVNAAIQAGKLAINNQGEAQCTDGSVYQMPEIVCAPGAKSVADCKGSYGTSTLFPLSMKQEASN

SEQ ID NO: 2001 - protein, 1000 aa, Kosakonia cowanii
MLAELTDFKKQVKLIRDSGIQFLDFAFSLPARKAYGEFLRQQGEGAVLRLIYNERDDKFQVPTPDGETPRNAEPEYALAIEDSLSLYAGIWLPLPFFRFNPPGGFSHGPTNWSRVQFHQLPEPDEKGNTWRATLIFDTKIFPDREHTQYLAPGEDDVRSGAGFALACLPHQMGDFLTLPWIEEWLNDIYTRQAHAVLRQHPEDTEEKLGLKEHQAHFLNLLEVLKKTIAIPEVQLNDVKIRDTAIPVDLVLDIGNSRSCGVLIEEHAADNKGLSQLYQLQLRDLSQPQFVYNEPFESRLEFAQAEFGKQDFSSKSGRSDAFTWPTIGRVGGEALRMAAQRLGTEGSTGLSSPKRYLWDDQPYSPGWRFSQAFVKSDREPLATAAPLLYMLNDHGKLLIRLNEDERMPVFSPVYSRSSLMTMMLSEVLSQALMQINSPAQRLKMSHASHPRRLRNVILTVPPAMPKPERAIFEACMHDAIRLVWKSLEWEEMDYDGEESGNAKQPHPGVHVKWDEATCGQLVYLYNETQTNFGGRTDEFFAATRRPDNQQAEGEQRSLKIASIDIGGGTTDLVITRYTLDDGKGINVRITPKQLFREGFKVAGDDILLDVIRLYLQPAVKAAMMKVGHSDIAAESMMSQLFGSEAIEAGKQVLRQQLTLQIFSPLALAILHRYEEYKPESGREVLNYTFRELLTGTTPTAKVQDYVNDVVRTGQLASEALFSLLDVPLEVDLARLHNEFIDPRSGRMNICHSLRALCEVLWHYNCDVLLLTGRPSRLPGIQALIRQLQPVPPTRVLPLHGYETGGWYPFNKKGCIDDPKSTAVVGAMLCLLAEKSRLNNFYFRAANFTAYSTIRYLGMLDGNNVIKDSNVFYSDIDLDAADFQLPQGQPFEARGEVRIGFRQLDNERWPASSLYTLKINNPNLASELAGDAVMRIELMAEQGRARNGEEAVSPERFRIESLEMEHARRNYSRKDVTFQLNTMVGNGMGESQYWLDSGSIKS

SEQ ID NO: 2002 - protein, 888 aa, Kosakonia cowanii
MNSINSKQIIQGWQGVERGAGEAIEWINAVRQDAPRLNTEADRLTINLRRSRNKARRLALAAAKPMTIGFFGLSQAGKSYLISALAAGENGKLETRLGGKQLDFLTHINPPGGGKEATGLVTRFSRRQVGGDERWPVTLQLFSEIEMGKILANAFIHDFNQEKFDWQYDEGRINDLLASLTKRRRATRVAGISEDDVVSLWDYLSRHAEKSQSRLALHYWPQAITLAPWLTPEDRGQLFSVLWGEVAELTEAYIRFAQTLHRLGGAQEVWAPLSTLVSEENGLLVQRDSIMNVDMLERLNKETDIRIEVCPVVEGQAAAPVTLSLAELTALTVELHIPLVASTREPLFETVDLLDFPGYRGRLGVESMDDIRRAVNSEESNPLAQLILRGKVAYLFERYTENQEMNVLVVCTASTKQSDVKEVGGVLDEWIRYTQGADAEARGRRLPGLIWALTMFDLRISQGLSQEEAILRQSWGLGGMIKMAMTERFGQYKWMQEWQRGQAFNNTFLVRKPRQQTPFIRISDGNEAAFSEENLPQLQLMRKTFLEDEAVNRYVASPDEAWDAMLKLNDGGMRRMADYLSTVARPEVKLERIAEQLQESRDELIEGGLGNWYQPDGEEDAAKKAQIARDILDVLKKRSGMHGELLLRLVPTRRDLQALYLQQTTLPVQEEAPEELDIFDIGVGAAFGAEAPAATTYSHEIAFAHQSVQHWINHLRGLSESPALLNYINLPRPIIDALADELITALLRLRIEEKLVEAMTNTEQAGVLLEQMVDRQVSRILHVMGDFITWLGYLEMPAAKRPTRLNMPDQHIFTRPSQCDSVVWKDDERLARLTPQQLNYTAMFIIDWLVGLESLITENAGHSAGREISVAQNEKLGAIIRQIQTSQE

SEQ ID NO: 2003 - protein, 426 aa, Kosakonia cowanii
MIRITRIVKPSVELTDYAASFSPFRTLLETYLPASIQNLYARPVIADDGAVEWYSDINGQPRRLLDLSETEQSRARAVLEQRLDSVRALHQKLAQSGSEPETMLRLLQAATHSPAPEQVWVIDGHPVIVPPAEGAPRAAAAATTAAAVSRRRWWPWLLLLALLIALILLLLSRCSPLHETAAPVTPAPPAVTPGEPVKPETTPAPHAPVKPTKAVCPAQRTQQQAPEMVVIMDASGSMAITMDATQDELISWNQGKYVENIEREPRRISLARNAAKGIIDTIPRDMNISLVAAENCRQVSLSPSFPFAQRSALKKRIEGIQPVGKTPLAEALALAGKKVDGVNRDAIILLVSDGDETCGGDPCQVARELKKSKPRLQVNVVDIMSTGAGNCIASSTGGKVFAVNNTREFKQIMKKAMQEYIPEGCE

SEQ ID NO: 2004 - protein, 468 aa, Kosakonia cowanii
MKEMFLCSDKLNKYQSMGENGQAVHISALQLRETLRLRKQSAAADVLAIPQISEHGERVDWYAPFSGDVIPWSAATESERQSALAQLETTQATLRQLSQDFAQSNQPEQQLFGKLLEKTLQFPDPEHVWLVNGKPVISFWGFVNARHQARIDPLDCLRPPKPVTPAAPLHSAPPVNEPLVTPPKRRGWWILPAWLCWLLPLLLLALLLLWLLRGCVPGVTIPGFSVEQPALPDAHLPVTENGATLPVTSSERVVGTTEGVTAPVVSGSTTGIVPLSDEERATAAPENAAALNDPAVPVAPETGSEPAQAGVEPVTPEAQVNDPALAEPNATAGNATAPVEVKNPLSLPPEALAQGRTDFLNGQWRAGAGIQDQRTGKPLSLNYQIKDGKGEVQMVRGDGVSCRGAVNAAIQAGKLAINNQGEAQCTDGSVYQMPEIVCAPGAKSVADCKGSYGTSTLFPLSMKQEASN

SEQ ID NO: 2005 - protein, 468 aa, Kosakonia cowanii
MKEMFLCSDKLNKYQSMGENGQAVHISALQLRETLRLRKQGAAADVLAIPQISEHGERIDWYAPFPGDVIPWSAATESERQSALAQLETTQATLRQLSQDFAQSNQPEQQLFGKLLEKTLQFPDPEHVWLVNGKPVISFWGFVNARHQARIDPLDCLRPPKPVTPAAPQHSAPPINEPVVTPPKRRGWWILPAWLCWLLPLLLLALLLLWLLRGCVPGVTIPGFSVEQPALPDAHLPVAENGATLPVTSSERVVGTTEGVTAPAVSGSTTGIGPLSDEESATVTPENAAALNDPAVPVAPETGSEPAQAGVEPVTPEAQVNDPALAEPNATAGNATAPVEVKNPLSLPPEALAQGRTDFLNGQWRAGAGIQDQRTGKPLSLNYQIKDGKGEVQMVRGDGVSCRGAVNAAIQAGKLAINNQGEAQCTDGSVYQMPEIVCAPGAKSVADCKGSYGTSTLFPLSMKQEASN

SEQ ID NO: 2006 - protein, 888 aa, Kosakonia cowanii
MNSINSKQIIQGWQGVERGAGEAIEWINAVRQDAPRLNTEADRLTINLRRSRNKARRLALAAAKPMTIGFFGLSQAGKSYLISALAAGENGKLETRLGGKQLDFLTHINPPGGGKEATGLVTRFSRRQVGGDERWPVTLQLFSEIEMGKILANAFIHDFNQEKFDWQYDEGRINDLLASLTKRRRPTRVAGISEDDVVSLWDYLSRHAEKSQSRLALHYWPQAITLAPWLTPEDRGQLFSVLWGEVAELTEAYIRFAQTLHRLGGAQEVWAPLSTLVSEENGLLVQRDSIMNVDMLERLNKETDIRIEVCPVVEGLAAAPVTLSLAELTALTVELHIPLVASTREPLFETVDLLDFPGYRGRLGVESMDDIRRAVNSEESNPLAQLILRGKVAYLFERYTENQEMNVLVVCTASTKQSDVKEVGGVLDEWIRYTQGADAEARGRRLPGLIWALTMFDLRISQGLSQEEAILRQSWGLGGMIKMAMTERFGQYKWMQEWQRGQAFNNTFLVRKPRQQTPFIRISDGNEAAFSEENLPQLQLMRKTFLEDEAVNRYIASPDEAWDAMLELNDGGMRRMADYLSTVARPEVKLERIAEQLQEIRDELIEGGLGNWYQPDGEEDAAKKAQIARDILDVLKKRSGMHGELLLRLVPTRRDLQALYLQQTTLPVQEETPEELDIFDIGVGAAFGAEAPAATTYSHEIAFAHQSVQHWINHLRGLSESPALLNYINLPRPIIDALADELITALLRLRIEEKLVEVMTNTEQAGVLLEQMVDRQVSRILHVMGDFITWLGYLEMPAAKRPTRLNMPEQHIFTRPSQCDSVVWKDDERLARLTPQQLNYTAMFIIDWLVGLESLITENAGHSAGREISVAQNEKLGAIIRQIQTSQE

SEQ ID NO: 2007 - protein, 426 aa, Kosakonia cowanii
MIRITRIVKPSVELTDYAASFSPFRTLLETYLPASIQNLYARPVIADDGAVEWYSDINGQPRRLLDLSETEQSRARALLEQRLDSVRALHQKLAQNGSEPETMLRQLQAATHSPAPEQVWVIDGHPVIVPPAEGAPRAADAATTAAAVSSRRWWPWLLLLALLIALILLLLSRCSPLHETAASVTPVPPAVTPGEPVKPETTPAPHAPVKPTKAVCPAQRTQQQAPEMVVIMDASGSMAITMDATQDELISWNQGKYVENIEREPRRISLARNAAKGIIDTIPRDMNISLVAAENCRQVSLSPSFPFAQRSALKKRIEGIQPVGKTPLAEALALAGKKVDGVNRDAIILLVSDGDETCGGDPCQVARELKKSKPRLQVNVVDIMSTGAGNCIASSTGGKVFAVNNTREFKQIMKKAMQEYIPEGCE

SEQ ID NO: 2008 - protein, 468 aa, Kosakonia cowanii
MKEMFLCSDKLNKYQSMGENGQAVHISALQLRETLRLRKQSAAADVLAIPQISEHGERVDWYAPFSGDVIPWSAATESERQSALAQLETTQATLRQLSQDFAQSNQPEQQLFGKLLEKTLQFPDAEHVWLVNGKPVISFWGFVNARHQARIDPLDCLRPPKPVTPAAPLHSAPPVNEPLVTPPKRRGWWILPAWLCWLLPLLLLALLLLWLLRGCVPGVTIPGFSVEQPALPDAHLPVAENGATLPVTSSERVVGTTEGVTAPVVSGSTTGIVPLSDEERATAAPENAAALNDPAVPVAPETGSEPAQAGVEPVTPEAQVNDPALAEPNATAGNATAPVEVKNPLSLPPEALAQGRTDFLNGQWRAGAGIQDQRTGKPLSLNYQIKDGKGEVQMVRGDGVSCRGAVNAAIQAGKLAINNQGEAQCTDGSVYQMPEIVCAPGAKSVADCKGSYGTSTLFPLSMKQEASN

SEQ ID NO: 2009 - protein, 1000 aa, Kosakonia cowanii
MLAELTDFKKQVKLIRDSGIQFLDFAFSLPARKAYGEFLRQQGEGAVLRLIYNERDDKFQVPTPDGETPRNAEPEYALAIEDSLSLYAGIWLPLPFFRFNPPGGFSHGPTNWSRVQFHQLPEPDEKGNTWRATLIFDTKIFPDREHTQYLAPGEDDVRSGAGFALACLPHQMGDFLTLPWIEEWLNDIYTRQAHAVLRQHPEDTEEKLGLKEHQAHFLNLLEVLKKTIAIPEVQLNDVKIRDTAIPVDLVLDIGNSRSCGVLIEEHAADNKGLSQLYQLQLRDLSQPQFVYNEPFESRLEFAQAEFGKQDFSSKSGRSDAFTWPTIGRVGGEAFRMAAQRLGTEGSTGLSSPKRYLWDDQPYSPGWRFSQAFVKSDREPLATAAPLLYMLNDHGKLLIRLNEDERMPVFSPVYSRSSLMTMMLSEVLSQALMQINSPAQRLKMSHASHPRRLRNVILTVPPAMPKPERAIFEACMHDAIRLVWKSLEWEEMDYDGEESGNAKQPHPGVHVKWDEATCGQLVYLYNETQTNFGGRTDEFFAATRRPDNQQAEGEQRSLKIASIDIGGGTTDLVITRYTLDDGKGINVRITPKQLFREGFKVAGDDILLDVIRLYLQPAVKAAMMKVGHSDIAAESMMSQLFGSEAIEAGKQVLRQQLTLQIFSPLALAILHRYEEYKPESGREVLNYTFRELLTGTTPTAKVQDYVNDVVRTGQLASEALFSLLDVPLEVDLARLHNEFIDPRSGRMNICHSLRALCEVLWHYNCDVLLLTGRPSRLPGIQALIRQLQPVPPTRVLPLHGYETGGWYPFNKKGCIDDPKSTAVVGAMLCLLAEKSRLNNFYFRAANFTAYSTIRYLGMLDGNNVIKDSNVFYSDIDLDAADFQLPQGLPFEARGEVRIGFRQLDNERWPASSLYTLKINNPNLASELAGDAVMRIELMAEQGRARNGEEAVSPERFRIESLEMENARRNYSRKDVTFQLNTMVGNGMGESQYWLDSGSIKS

SEQ ID NO: 2010 - protein, 888 aa, Kosakonia cowanii
MNSINSKQIIQGWQGVERGAGEAIKWINAVRQDAPRLNTEADRLTINLRRSRNKARRLALAAAKPMTIGFFGLSQAGKSYLISALAAGENGKLETRLGGKQLDFLTHINPPGGGKEATGLVTRFSRRQVGGDERWPVTLQLFSEIEMGKILANAFIHDFNQEKFDWQYDEGRINDLLASLTKRRRPTRVAGISEDDVVSLWDYLSRHAEKSQSRLALHYWPQAITLAPWLTPEDRGQLFSVLWGEVAELTEAYIRFAQTLHRLGGAQEVWAPLSTLVSEENGLLVQRDSIMNVDMLERLNKETDIRIEVCPVVEGQAAAPVTLSLAELTALTVELHIPLVASTREPLFETVDLLDFPGYRGRLGVESMDDIRRAVNSEESNPLAQLILRGKVAYLFERYTENQEMNVLVVCTASTKQSDVKEVGGVLDEWIRYTQGADAEARGRRLPGLIWALTMFDLRISQGLSQEEAILRQSWGLGGMIKMAMTERFGQYKWMQEWQRGQAFNNTFLVRKPRQQTPFIRISDGNEAAFSEENLPQLQLMRKTFLEDEAVNRYIASPDEAWDAMLELNDGGMRRMADYLSTVARQEVKLERIAEQLQEIRDELIEGGLGNWYQPDGEEDAAKKAQIARDILDVLKKRSGMHGELLLRLVPTRRDLQALYLQQTTLPVQEEAPEELDIFDIGVGAAFGAEAPAATTYSHEIAFAHQSVQHWINHLRGLSESPALLNYINLPRPIIDALADELITALLRLRIEEKLVEAMTNTEQAGVLLEQMVDRQVSRILHVMGDFITWLGYLEMPAAKRPTRLNMPDQHIFTRPSQCDSVVWKDDERLARLTPQQLNYTAMFIIDWLVGLESLITENAGHSAGREISVAQNEKLGAIIRQIQTSQE

SEQ ID NO: 2011 - protein, 426 aa, Kosakonia cowanii
MIRITRIVKPSVELTDYAASFSPFRTLLETYLPASIQNLYARPVIADDGAVEWYSDINGQPRRLLDLSETEQSRARAVLEQRLDSVRALHQKLAQSGSEPETMLRLLQAATHSPAPEQVWVIDGHPVIVPPAEGAPRAAAAATTAAAVSSRRWWPWLLLLALLIALILLLLSRCSPLHETAAPVTPAPPAVTPGEPVKPEKTPAPHAPVKPTKAVCPAQRTQQQAPEMVVIMDASGSMAITMDATQDELISWNQGKYVENIEREPRRISLARNAAKGIIDTIPRDMNISLVAAENCRQVSLSPSFPFAQRSALKKRIEGIQPVGKTPLAEALALAGKKVDGVNRDAIILLVSDGDETCGGDPCQVARELKKSKPRLQVNVVDIMSTGAGNCIASSTGGKVFAVNNTREFKQIMKKAMQEYIPEGCE

SEQ ID NO: 2012 - protein, 426 aa, Kosakonia cowanii
MIRITRIVKPSVELTDYAASFSPFRTLLETYLPASIQNLYARPVIADDGAVEWYSDINGQPRRLLDLSETEQSRARAVLEQRLDSVRALHQKLAQSGSEPETMLRLLQAATHSPAPEQVWVIDGHPVIVPPAEGAPRAAAAATTAAAVSSRRWWPWLLLLALLIALILLLLSRCSPLHETAAPVTPVPPAVTPGEPVKPETTPAPHAPVKPTKAVCPAQRTQQQAPEMVVIMDASGSMAITMDATQDELISWNQGKYVENIEREPRRISLARNAAKGIIDTIPRDMNISLVAAENCRQVSLSPSFPSAQRSALKKRIEGIQPVGKTPLAEALALAGKKVDGVNRDAIILLVSDGDETCGGDPCQVARELKKSKPRLQVNVVDIMSTGAGNCIASSTGGKVFAVNNTREFKQIMKKAMQEYIPEGCE

SEQ ID NO: 2013 - protein, 468 aa, Kosakonia cowanii
MKEMFLCSDKLNKYQSMGENGQAVHISALQLRETLRLRKQSAAADVLAIPQISEHGERVDWYAPFSGDVIPWSAATESERQSALAQLETTQATLRQLSQDFAQSNQPEQQLFGKLLEKTLQFPDPEHVWLVNGKPVISFWGFVNARHQARIDPLDCLRPPKPVTPAAPLHSAPPVNEPLVTPPKRRGWWILPAWLCWLLPLLLLALLLLWLLRGCVPGVTIPGFSVEKPALPDAHLPVAENGATLPVTSSERVVGTTEGVTAPVVSGSTTGIGPLSDEERATAAPENAAALNDPAVPVAPETGSEPAQAGVEPVTPEAQVNDPALAEPNATAGNATAPVEVKNPLSLPPEALAQGRTDFLNGQWRAGAGIQDQRTGKPLSLNYQIKDGKGEVQMVRGDGVSCRGAVNAAIQAGKLAINNQGEAQCTDGSVYQMPEIVCAPGAKSVADCKGSYGTSTLFPLSMKQEASN

SEQ ID NO: 2014 - protein, 888 aa, Kosakonia cowanii
MNSINSKQIIQGWQGVERGAGEAIEWINAVRQDAPRLNTEADRLTINLRRSRNKARRLALAAAKPMTIGFFGLSQAGKSYLISALAAGENGKLETRLGGKQLDFLTHINPPGGGKEATGLVTRFSRRQVGGDERWPVTLQLFSEIEMGKILANAFIHDFNQEKFDWQYDEGRINDLLASLTKRCRPTRVAGISEDDVVSLWDYLSRHAEKSQSRLALHYWPQAITLAPWLTPEDRGQLFSVLWGEVAELTEAYIRFAQTLHRLGGAQEVWAPLSTLVSEENGLLVQRDSIMNVDMLERLNKETDIRIEVCPVVEGQAAAPVTLSLAELTALTVELHIPLVASTREPLFETVDLLDFPGYRGRLGVESMDDIRRAVNSEESNPLAQLILRGKVAYLFERYTENQEMNVLVVCTASTKQSDVKEVGGVLDEWIRYTQGADAEARGRRLPGLIWALTMFDLRISQGLSQEEAILRQSWGLGGMIKMAMTERFGQYKWMQEWQRGQAFNNTFLVRKPRQQTPFIRISDGNEAAFSEENLPQLQLMRKTFLEDEAVNRYIASPDEAWDAMLELNDGGMRRMADYLSTVARPEVKLERIAEQLQEIRDELIEGGLGNWYQPDGEEDAAKKAQIARDILDVLKKRSGMHGELLLRLVPTRRDLQALYLQQTTLPVQEEAPEELDIFDIGVGAAFGAEAPAATTYSHEIAFAHQSVQHWINHLRGLSESPALLNYINLPRPIIDALADELITALLRLRVEEKLVEAMTNTEQAGVLLEQMVDRQVSRILHVMGDFITWLGYLEIPAAKRPTRLNMPDQHIFTRPSQCDSVVWKDDERLARLTPQQLNYTAMFIIDWLVGLESLITENAGHSAGREISVAQNEKLGAIIRQIQTSQE

SEQ ID NO: 2015 - protein, 1000 aa, Kosakonia cowanii
MLAELTDFKKQVKLIRDSGIQFLDFAFSLPARKAYGEFLRQQGEGAVLRLIYNERDDKFQVPTPDGETPRNAEPEYALAIEDSLSLYAGIWLPLPFFRFNPPGGFSHGPTNWSRVQFHQLPEPDEKGNTWRATLIFDTKIFPDREHTQYLAPGEDDVRSGAGFALACLPHQMGDFLTLPWIEEWLNDIYTRQAHAVLRQHPEDTEEKLGLKEHQAHFLNLLEVLKKTIVIPEVQLNDVKIRDTAIPVDLVLDIGNSRSCGVLIEEHAADNKGLSQLYQLQLRDLSQPQFVYNEPFESRLEFAQAEFGKQDFSSKSGRSDAFTWPTIGRVGGEAFRMAAQRLGTEGSTGLSSPKRYLWDDQPYSPGWRFSQAFVKSDREPLATAAPLLYMLNDHGKLLIRLNEDERMPVFSPVYSRSSLMTMMLSEVLSQALMQINSPAQRLKMSHASHPRRLRNVILTVPPAMPKPERAIFEACMHDAIRLVWKSLEWEEMDYDGEESGNAKQPHPGVHVKWDEATCGQLVYLYNETQTNFGGRTDEFFAATRRPDNQQAEGEQRSLKIASIDIGGGTTDLVITRYTLDDGKGINVRITPKQLFREGFKVAGDDILLDVIRLYLQPAVKAAMMKVGHSDIAAESMMSQLFGSEAIEAGKQVLRQQLTLQIFSPLALAILHRYEEYKPESGREVLNYTFRELLTGTTPTAKVQDYVNDVVRTGQLASEALFSLLDVPLEVDLARLHNEFIDPRSGRMNICHSLRALCEVLWHYNCDVLLLTGRPSRLPGIQALIRQLQPVPPTRVLPLHGYETGGWYPFNKKGCIDDPKSTAVVGAMLCLLAEKSRLNNFYFRAANFTAYSTIRYLGMLDGNNVIKDSNVFYSDIDLDAADFQLPQGQPFEARGEVRIGFRQLDNERWPASSLYTLKINNPNLASELAGDAVMRIELMAEQGRARNGEEAVSPERFRIESLEMENARRNYSRKDVTFQLNTMVGNGMGESQYWLDSGSIKS

SEQ ID NO: 2016 - protein, 426 aa, Kosakonia cowanii
MIRITRIVKPSVELTDYAASFSPFRTLLETYLPASIQNLYARPVIADDGAVEWYSDINGQPRRLLDLSETEQSRARALLEQRLDSVRALHQKLAQSGSEPETMLRLLQAATHSPAPEQVWVIDGHPVIVPPAEGAPRAAAAATTAAAVSSRRWWPWLLLLALLIALILLLLSRCSPLHETAAPVTPVPPAVTPGEPVKPETTPAPHAPVKPTKAVCPAQRTQQQAPEMVVIMDASGSMAITMDATQDELISWNQGKYVENIEREPRRISLARNAAKGIIDTIPRDMNISLVAAENCRQVSLSPSFPSAQRSALKKRIEGIQPVGKTPLAEALALAGKKVDGVNRDAIILLVSDGDETCGGDPCQVARELKKSKPRLQVNVVDIMSTGAGNCIASSTGGKVFAVNNTREFKQIMKKAMQEYIPEGCE

SEQ ID NO: 2017 - protein, 468 aa, Kosakonia cowanii
MKEMFLCSDKLNKYQSMGENGQAVHISALQLRETLRLRKQSAAADVLAIPQISEHGERVDWYAPFSGDVIPWSAATESERQSALAQLETTQATLRQLSQDFAQSNQPEQQLFGKLLEKTLQFPDPEHVWLVNGKPVISFWGFVNARHQARIDPLDCLRPPKPVTPAAPLHSAPPVNEPLVTPPKRRGWWILPAWLCWLLPLLLLALLLLWLLRGCVPGVTIPGFSVEQPALPDAHLPVAENGATLPVTSSERVVGTTEGVTAPVVSGSTTGIVPLSDEERATAAPENAAALNDPAVPVAPETGSEPAQAGVEPVTPEAQVNDPALAEPNATADNATAPVEVKNPLSLPPEALAQGRTDFLNGQWRAGAGIQDQRTGKPLSLNYQIKDGKGEVQMVRGDGVSCRGAVNAAIQAGKLAINNQGEAQCTDGSVYQMPEIVCAPGAKSVADCKGSYGTSTLFPLSMKQEASN

SEQ ID NO: 2018 - protein, 1000 aa, Kosakonia cowanii
MLAELTDFKKQVKLIRDSGIQFLDFAFSLPARKAYGEFLRQQGEGAVLRLIYNERDDKFQVPTPDGETPRNAEPEYALAIEDSLSLYAGIWLPLPFFRFNPPGGFSHGPTNWSRVQFHQLPEPDEKGNTWRATLIFDTKIFPDREHTQYLAPGEDDVRSGAGFALACLPHQMGDFLTLPWIEEWLNDIYTRQAHAVLRQHPEDTEEKLGLKEHQAHFLNLLEVLKKTIAIPEVQLNDVKIRDTAIPVDLVLDIGNSRSCGVLIEEHAADNKGLSQLYQLQLRDLSQPQFVYNEPFESRLEFAQAEFGKQDFSSKSGRSDAFTWPTIGRVGGEAFRMAAQRLGTEGSTGLSSPKRYLWDDQPYSPGWRFSQAFVKSDREPLATAAPLLYMLNDHGKLLIRLNEDERMPVFSPVYSRSSLMTMMLSEVLSQALMQINSPAQRLKMSHASHPRRLRNVILTVPPAMPKPERAIFEACMHDAIRLVWKSLEWEEMDYDGEESGNAKQPHPGVHVKWDEATCGQLVYLYNETQTNFGGRTDEFFAATRRPDNQQAEGEQRSLKIASIDIGGGTTDLVITRYTLDDGKGINVRITPKQLFREGFKVAGDDILLDVIRLYLQPAVKAAMMKVGHSDIAAESMMSQLFGSEAIEAGKQVLRQQLTLQIFSPLALAILHRYEEYKPESGREVLNYTFRELLTGTTPTAKVQDYVNDVVRTGQLASEALFSLLDVPLEVDLARLHNEFIDPRSGRMNICHSLRALCEVLWHYNCDVLLLTGRPSRLPGIQALIRQLQPVPPTRVLPLHGYETGGWYPFNKKGCIDDPKSTAVVGAMLCLLAEKSRLNNFYFRAANFTAYSTIRYLGMLDGNNVIKDSNVFYSDIDLDAADFQLPQGQPFEARGEVRIGFRQLDNERWPASSLYTLKINNPNLASELAGDAVMRIELMAEQGRARNGEEAVSPERFRIESLEMEHARRNYSRKDVTFQLNTMVGNGMGESQYWLDSGSIKS

SEQ ID NO: 2019 - protein, 888 aa, Kosakonia cowanii
MNSINSKQIIQGWQGVERGAGEAIEWINAVRQDAPRLNTEADRLTINLRRSRNKARRLALAAAKPMTIGFFGLSQAGKSYLISALAAGENGKLETRLGGKQLDFLTHINPPGGGKEATGLVTRFSRRQVGGDERWPVTLQLFSEIEMGKILANAFIHDFNQEKFDWQYDEGRINDLLASLTKRRRPTRVAGISEDDVVSLWDYLSRHAEKSQSRLALHYWPQAITLAPWLTPEDRGQLFSVLWGEVAELTEAYIRFAQTLHRLGGAQEVWAPLSTLVSEENGLLVQRDSIMNVDMLERLNKETDIRIEVCPVVEGQAAAPVTLSLAELTALTVELHIPLVASTREPLFETVDLLDFPGYRGRLGVESMDDIRRAVNSEESNPLAQLILRGKVAYLFERYTENQEMNVLVVCTASTKQSDVKEVGGVLDEWIRYTQGADAEARGRRLPGLIWALTMFDLRISQGLSQEEAILRQSWGLGGMIKMAMTERFGQYKWMQEWQRGQAFNNTFLVRKPRQQTPFIRISDGNEAAFSEENLPQLQLMRKTFLEDEAVNRYIASPDEAWDAMLELNDGGMRRMADYLSTVARPEVKLERIAEQLQEIRDELIEGGLGNWYQPDGEEDAAKKAQIARDILDVLKKRSGMHGELLLRLVPTRRDLQALYLQQTTLPVQEEAPEELDIFDIGVGAAFGAEAPAATTYSHEIAFAHQSVQHWINHLRGLSESPALLNYINLPRPIIDALADELITALLRLRIEEKLVEAMTNTEQAGVLLEQMVDRQVSRILHVMGDFITWLGYLEMPAAKRPTRLNMPDQHIFTRPSQCDSVVWKDDERLARLTPQQLNYTAMFIIDWLVGLESLITENAGHSAGREISVAQNEKLGAIIRQIQTSQE

SEQ ID NO: 2020 - protein, 566 aa, Kosakonia cowanii
MKPVKRLYLSGDEVHAADVNIVLELSNCGRGFITAATEQDYTGKMVRLDIGYGESLFRWFTGYVERSQPAEKGFSRLFVRELSGVFEKLWPCSFQHPTLRDITAWLTENSGLTVAVPDAGYSDKPVPHFTHSGTGFQLLNNLGKAFGVADYLWYQLPDGSLYTGGAEKSLFAARPVDIPHEFSQAAAGGNSMTLPMIQTMRPGVEMNGERVTKVSLTGDTMVITWTPRDKATGAPLQKTPAQRQIESHFPELASGMHLPKFARVMAASEPASSGDFADPFRPRYAVDVQLLDADGKPDSGTPVYSAVPLPVPMAGNDSGMFQFPPEGTLVEVAFTGGRPDKPFVRQTVPEGTSLPDVKPGEQLQQQRAEVSQRVTQGGDWERQTDQSIRETSMSRHVQADTETREMVTRETTIKATDKTTVLGTATLMAGHIQHVTSGDYAMATGGKYVASVTGDAETEIAGKQSTKVTGGISIETSGALTEKIAALRKSVAAGGQQLMGATVHIGSESINALAMMLDTIDLLAELAQQCASHTHPGTGAPASASAFTQVAARAGQTRSKYDKIIA

SEQ ID NO: 2021 - protein, 426 aa, Kosakonia cowanii
MIRITRIVKPSVELTDYAASFSPFRTLLETYLPASIQNLYARPVIADDGAVEWYSDINGQPRRLLDLSETEQSRARAVLEQRLDSVRALHQKLAQSGSEPETMLRLLQAATHSPAPEQVWVIDGHPVIVPPAEGAPRAAAAAATAAAVSRRRWWPWLLLLALLIALILLLLSSCSPLHETAAPVTPVPPAVTPGEPVKPETTPAPHAPVKPTKAVCPAQRTQQQAPEMVVIMDASGSMAITMDATQDELISWNQGKYVENIEREPRRISLARNAAKGIIDTIPRDMNISLVAAENCRQVSLSPSFPFAQRSALKKRIEGIQPVGKTPLAEALALAGKKVDGVNRDAIILLVSDGDETCGGDPCQVARELKKSKPRLQVNVVDIMSTGAGNCIASSTGGKVFAVNNTREFKQIMKKAMQEYIPEGCE

SEQ ID NO: 2022 - protein, 468 aa, Kosakonia cowanii
MKEMFLCSDKLNKYQSMGENGQAVHISALQLRETLRLRKQSAAADVLAIPQISEHGERVDWYAPFSGDVIPWSAATESERQSALAQLETTQATLRQLSQDFAQSNQPEQQLFGKLLEKTLQFPDPEHVWLVNGKPVISFWGFVNARHQARIDPLDCLRPPKPVTPAAPLHSAPPVNEPLVTPPKRRGWWILPAWLCWLLPLLLLALLLLWLLRGCVPGVTIPGFSVEQPALPDAHLPVAENGATLPVTSSERVVGTTEGVTAPVVSGSTTGIVPLSDEERATAAPENAAALNDPAVPVAPETGSEPAQAGVEPVTPEAQVNDPALAEPNATAGNATAPVEVKNPLSLPPEALAQGRTDFLNGQWRAGAGIQDQRTGKPLSLNYQIKDGKGEVQMVRGDGVSCRGAVNAAIQAGKLAINNQGEAQCTDGSVYQMPEIVCAPGAKSVADCKGSYGTSTLFPLSMKQEASN

SEQ ID NO: 2023 - protein, 1000 aa, Kosakonia cowanii
MLAELTDFKKQVKLIRDSGIQFLDFAFSLPARKAYGEFLRQQGEGAVLRLIYNERDDKFQVPTPDGETPRNAEPEYALAIEDSLSLYAGIWLPLPFFRFNPPGGFSHGPTNWSRVQFHQLPEPDEKGNTWRATLIFDTKIFPDREHTQYLAPGEDDVRSGAGFALACLPHQMGDFLTLPWIEEWLNDIYTRQAHAVLRQHPEDTEEKLGLKEHQAHFLNLLEVLKKTIVIPEVQLNDVKIRDTAIPVDLVLDIGNSRSCGVLIEEHAADNKGLSQLYQLQLRDLSQPQFVYNEPFESRLEFAQAEFGKQDFSSKSGRSDAFTWPTIGRVGGEAFRMAAQRLGTEGSTGLSSPKRYLWDDQPYSPGWRFSQAFVKSDREPLATAAPLLYMLNDHGKLLIRLNEDERMPVFSPVYSRSSLMTMMLSEVLSQALMQINSPAQRLKMSHASHPRRLRNVILTVPPAMPKPERAIFEACMHDAIRLVWKSLEWEEMDYDGEESGNAKQPHPGVHVKWDEATCGQLVYLYNETQTNFGGRTDEFFAATRRPDNQQAEGEQRSLKIASIDIGGGTTDLVITRYTLDDGKGINVRITPKQLFREGFKVAGDDILLDVIRLYLQPAVKAAMMKVGHSDIAAESMMSQLFGSEAIEAGKQVLRQQLTLQIFSPLALAILHRYEEYKPESGREVLNYTFRELLTGTTPTAKVQDYVNDVVRTGQLASEALFSLLDVPLEVDLARLHNEFIDPRSGRMNICHSLRALCEVLWHYNCDVLLLTGRPSRLPGIQALIRQLQPVPPTRVLPLHGYETGGWYPFNKKGCIDDPKSTAVVGAMLCLLAEKSRLNNFYFRAANFTAYSTIRYLGMLDGNNVIKDSNVFYSDIDLDVADFQLPQGQPFEARGEVRIGFRQLDNERWPASSLYTLKINNPNLASELAGDAVMRIELMAEQGRARNGEEAVSPERFRIESLEMEHARRNYSRKDVTFQLNTMVGNGMGESQYWLDSGSIKS

SEQ ID NO: 2024 - protein, 888 aa, Kosakonia cowanii
MNSINSKQIIQGWQGVERGAGEAIEWINAVRQDAPRLNTEADRLTINLRRSRNKARRLALAAAKPMTIGFFGLSQAGKSYLISALAAGENGKLETRLGGKQLDFLTHINPPGGGKEATGLVTRFSRRQVGGDERWPVTLQLFSEIEMGKILANAFIHDFNQEKFDWQYDEGRINDLLASLTKRRRPTHVAGISEDDVVSLWDYLSRHAEKSQSRLALHYWPQAITLAPWLTPEDRGQLFSVLWGEVAELTEAYIRFAQTLHRLGGAQEVWAPLSTLVSEENGLLVQRDSIMNVDMLERLNKETDIRIEVCPVVEGQAAAPVTLSLAELTALTVELHIPLVASTREPLFETVDLLDFPGYRGRLGVESMDDIRRAVNSEESNPLAQLILRGKVAYLFERYTENQEMNVLVVCTASTKQSDVKEVGGVLDEWIRYTQGADAEARGRRLPGLIWALTMFDLRISQGLSQEEAILRQSWGLGGMIKMAMTERFGQYKWMQEWQRGQAFNNTFLVRKPRQQTPFIRISDGNEAAFSEENLPQLQLMRKTFLEDEAVNRYIASPDEAWDAMLELNDGGMRRMADYLSTVARPEVKLERIAEQLQEIRDELIEGGLGNWYQPDGEEDAAKKAQIARDILDVLKKRSGMHGELLLRLVPTRRDLQALYLQQTTLPVQEEAPEELDIFDIGVGAAFGAEAPAATTYSHEIAFAHQSVQHWINHLRGLSESPALLNYINLPRPIIDALADELITALLRLRIEEKLVEAMTNTEQAGVLLEQMVDRQVSRILHVMGDFITWLGYLEMPAAKRPTRLNMPDQHIFTRPSQCDSVVWKDDERLARLTPQQLNYTAMFIIDWLVGLESLITENAGHSAGREISVAQNEKLGAIIRQIQTSQE

SEQ ID NO: 2025 - protein, 566 aa, Kosakonia cowanii
MKPVKRLYLSGDEVHAADVNIVLELSNCGRGFITAATEQDYTGKMVRLDIGYGESLFRWFTGYVERSQPAEKGFSRLFVRELSGVFEKLWPCSFQHPTLRDITAWLTENSGLTVAVPDAGYSDKPVPHFTHSGTGFQLLNNLGKAFGVADYLWYQLPDGSLYTGGAEKSLFASRPVDIPHEFSQAAAGGNSMTLPMIQTMRPGVEMNGERVTKVNLTGDTMVITWTPRDKATGAPLQKTPAQRQIESHFPELASGMHLPKFARVMAASEPASSGNFADPFRPRYAVDVQLLDADGKPDSGTPVYSAVPLPVPMAGNDSGMFQFPPEGTLVEVAFTGGRPDKPFVRQTVPEGTSLPDVKPGEQLQQQRAGVSQRVTQGGDWERQTDQSIRETSMSRHVQADTETRKMVTRETTIKATDKTTVLGTATLMAGHIQHVTSGDYAMATGGKYVASVAGDAETEIAGKQSTKVTGGISIETSGALTEKIAALRKSVAAGGQQLMGATVHIGSESINALAMMLDTIDLLAELAQQCASHTHPGTGAPASASAFTQVAARAGQTRSKYQKIIA

SEQ ID NO: 2026 - protein, 426 aa, Kosakonia cowanii
MIRITRIVKPSVELTDYATSFSPFRTLLETYLPASIQNLYARPVIADDGAVEWYSDINGQPRRLLDLSETEQSRACAVLEQRLDSVRALHQKLAQSGSEPETMLRLLQAASHSPAPEQVWVIDGHPVIVPPAEGTPRAAAAATTAAAVSSRRWWPWLLLLALLIALILLLLSRCSPLHETAAPVTPAPPAVTPGEPVKPETAPAPQAPVKPTKAVCPAQRTQQQAPEMVVIMDASGSMAITMDATQDELISWNQGKYVENIEREPRRISLARNAAKGIIDTIPRDMNISLVAAENCRQVSLSPSFPFAQRSALKKRIEGIQPVGKTPLAEALALAGKKVDGVNRDAIILLVSDGDETCGGDPCQVARELKKSKPRLQVNVVDIMSTGAGNCIASSTGGKVFAVNNTREFKQIMKKAMQEYIPEGCE

SEQ ID NO: 2027 - protein, 1000 aa, Kosakonia cowanii
MLAELTDFKKQVKLIRDSGIQFLDFAFSLPARKAYGEFLRQQGEGAVLRLIYNERDDKFQVPTPDGETPRNAEPEYALAIEDSLNLYAGIWLPLPFFRFNPPGGFSHGPTNWSRVQFHQLPEPDEKGNTWRATLIFDTKIFPDREHTQYLAPGEDDVRSGAGFALACLPHQMGDFLTLPWIEEWLNDIYTRQAHAVLRQHPEDTEEKLGLKEHQAHFLNLLEVLKKTIAIPEVQLNDVKIRDTAIPVDLVLDIGNSRSCGVLIEEHAADNKGLSQLYQLQLRDLSQPQFVYNEPFESRLEFAQAEFGKQDFSSKSGRSDAFTWPTIGRVGGEAFRMAAQRLGTEGSTGLSSPKRYLWDDQPYSPGWRFSQAFVKSDREPLATAAPLLYMLNDHGKLLIRLNEDERMPVFSPVYSRSSLMTMMLSEVLSQALMQINSPAQRLKMSHASHPRRLRNVILTVPPAMPKPERAIFEACMHDAIRLVWKSLEWEEMDYDGEESGNAKQPHPGVHVKWDEATCGQLVYLYNETQTNFGGRTDEFFAATRRPDNQQAEGEQRSLKIASIDIGGGTTDLVITRYTLDDGKGINVRITPKQLFREGFKVAGDDILLDVIRLYLQPAVKAAMMKVGHSDIAAESMMSQLFGSEAIEAGKQVLRQQLTLQIFSPLALAILHRYEEYKPESGREVLNYTFRELLTGTTPTAKVQDYVNDVVRTGQLANEAPFSLLDVPLEVDLARLHNEFIDPRSGRMNICHSLRALCEVLWHYNCDVLLLTGRPSRLPGIQALIRQLQPVPPTRVLPLHGYETGGWYPFNKKGCIDDPKSTAVVGAMLCLLAEKSRLNNFYFRAANFTAYSTIRYLGMLDGNNVIKDSNVFYSDIDLDAADFQLPQGLPFEARGEVRIGFRQLDNERWPASSLYTLKINNPNLASELAGDAVMRIELMAEQGRARNGEEAVSPERFRIESLEMENARRNYSRKDVTFQLNTMVGNGMGESQYWLDSGSIKS

SEQ ID NO: 2028 - protein, 426 aa, Kosakonia cowanii
MIRITRIVKPSVELTDYAASFSPFRTLLETYLPASIQNLYARPVIADDGAVEWYSDINGQPRRLLDLSETEQSRARALLEQRLDSVRALHQKLAQNGSEPETMLRQLQAATHSPAPEQVWVIDGHPVIVPPAEGAPRAADAATTAAAVSSRRWWPWLLLLALLIALILLLLSRCSPLHETAAPVAPVPPAVTPGEPVKPETTPAPHAPVKPTKAVCPAQRTQQQAPEMVVIMDASGSMAITMDATQDELISWNQGKYVENIEREPRRISLARNAAKGIIDTIPRDMNISLVAAENCRQVSLSPSFPFAQRSALKKRIEGIQPVGKTPLAEALALAGKKVDGVNRDAIILLVSDGDETCGGDPCQVARELKKSKPRLQVNVVDIMSTGAGNCIASSTGGKVFAVNNTREFKQIMKKAMQEYIPEGCE

SEQ ID NO: 2029 - protein, 468 aa, Kosakonia cowanii
MKEMFLCSDKLNKYQSMGENGQAVHISALQLRETLRLRKQSAAADVLAIPQISEHGERVDWYAPFSGDVIPWSAATESERQSALAQLETTQATLRQLSQDFAQSNQPEQQLFGKLLEKTLQFPDPEHVWLVNGKPVISFWGFVNARHQARIDPLDCLRPPKPVTPAAPLHSAPPVNEPLVTQPKRRGWWILPAWLCWLLPLLLLALLLLWLLRGCVPGVTIPGFSVEKPALPDVHLPVAENGATLPVTSSERIVGTTEGVTAPVVSGSTTGIVPLSDEERATAAPENAAALNDPAVPVAPETGSEPAQAGVEPVTPEAQVNDPALAEPNATAGNATAPVEVKNPLSLPPEALAQGRTDFLNGQWRAGAGIQDQRTGKPLSLNYQIKDGKGEVQMVRGDGVSCRGAVNAAIQAGKLAINNQGEAQCTDGSVYQMPEIVCAPGAKSVADCKGSYGTSTLFPLSMKQEASN

SEQ ID NO: 2030 - protein, 1000 aa, Kosakonia cowanii
MLAELTDFKKQVKLIRDSGIQFLDFAFSLPARKAYGEFLRQQGEGAVLRLIYNERDDKFQVPTPDGETPRNAEPEYALAIEDSLSLYAGIWLPLPFFRFNPPCGFSHGPTNWSRVQFHQLPEPDEKGNTWRATLIFDTKIFPDREHTQYLAPGEDDVRSGAGFALACLPHQMGDFLTLPWIEEWLNDIYTRQAHAVLRQHPEDTEEKLGLKEHQAHFLNLLEVLKKTIAIPEVQLNDVKIRDTAIPVDLVLDIGNSRSCGVLIEEHAADNKGLSQLYQLQLRDLSQPQFVYNEPFESRLEFAQAEFGKQDFSSKSGRSDAFTWPTIGRVGGEAFRMAAQRLGTEGSTGLSSPKRYLWDDQPYSPGWRFSQAFVKSDREPLATAAPLLYMLNDHGKLLIRLNEDERMPVFSPVYSRSSLMTMMLSEVLSQALMQINSPAQRLKMSHASHPRRLRNVILTVPPAMPKPERAIFEACMHDAIRLVWKSLEWEEMDYDGEESGNAKQPHPGVHVKWDEATCGQLVYLYNETQTNFGGRTDEFFAATRRPDNQQAEGEQRSLKIASIDIGGGTTDLVITRYTLDDGKGINVRITPKQLFREGFKVAGDDILLDVIRLYLQPAVKAAMMKVGHSDIAAESMMSQLFGSEAIEAGKQVLRQQLTLQIFSPLALAILHRYEEYKPESGREVLNYTFRELLTGTTPTAKVQDYVNDVVRTGQLASEALFSLLDVPLEVDLARLHNEFIDPRSGRMNICHSLRALCEVLWHYNCDVLLLTGRPSRLPGIQALIRQLQPVPPTRVLPLHGYETGGWYPFNKKGCIDDPKSTAVVGAMLCLLAEKSRLNNFYFRAANFTAYSTIRYLGMLDGNNVIKDSNVFYSDIDLDAADFQLPQGQPFEARGEVRIGFRQLDNERWPASSLYTLKINNPNLASELAGDAVMRIELMAEQGRARNGEEAVSPERFRIESLEMENARRNYSRKDVTFQLNTMVGNGMGESQYWLDSGSIKS

SEQ ID NO: 2031 - protein, 888 aa, Kosakonia cowanii
MNSINSKQIIQGWQGVERGAGEAIEWINAVRQDAPRLNTEADRLTINLRRSRNKARRLALAAAKPMTIGFFGLSQAGKSYLISALAAGENGKLETRLGGKQLDFLTHINPPGGGKEATGLVTRFSRRQVGGDERWPVTLQLFSEIEMGKILANAFIHDFNQEKFDWQYDEGRISDLLNSLAKRRRPTRVAGISEDDVVSLWDYLSRHAEKSQSRLALHYWPQAITLAPWLTPEDRGQLFSVLWGEVAELTEAYIRFAQTLHRLGGAQEVWAPLSTLVSEENGLLVQRDSIMNVDMLERLNKETDIRIEVCPVVEGQAAAPVTLSLAELTALTVELHIPLVASTREPLFETVDLLDFPGYRGRLGVESMDDIRRAVNSEESNPLAQLILRGKVAYLFERYTENQEMNVLVVCTASTKQSDVKEVGGVLDEWIRYTQGADAEARGRRLPGLIWALTMFDLRISQGLSQEEAILRQSWGLGGMIKMAMTERFGQYKWMQEWQRGQAFNNTFLVRKPRQQTPFIRISDGNEAAFSEENLPQLQLMRKTFLEDEAVNRYIASPDEAWDAMLELNDGGMRRMADYLSTVARPEVKLERIAEQLQEIRDELIEGGLGNWYQPDGEEDAAKKAQIARDILDVLKKRSGMHGELLLRLVPTRRDLQALYLQQTTLPVQEEAPEELDIFDIGVGAAFGAEAPAATTYSHEIAFAHQSVQHWINHLRGLSESPALLNYINLPRPIIDALADELITALLRLRIEEKLVEAMTNTEQAGVLLEQMVDRQVSRILHVMGDFITWLGYLEMPAAKRPTRLNMPDQHIFTRPSQCDSVVWKDDERLARLTPQQLNYTAMFIIDWLVGLESLITENAGHSAGREISVAQNEKLGAIIRQIQTSQE

SEQ ID NO: 2032 - protein, 468 aa, Kosakonia cowanii
MKEMFLCSDKLNKYQSMGENGQAVHISALQLRETLRLRKQGAAADVLAIPQISEHGERIDWYAPFPGDVIPWSAATESERQSALAQLETTQATLRQLSQDFAQSNQPEQQLFGKLLEKTLQFPDPEHVWLVNGKPVISFWGFVNARHQARIDPLDCLRPPKPVTPAAPLHSAPPINEPVVTPPKRRGWWILPAWLCWLLPLLLLALLLLWLLRGCVPGVTIPGFSVEQPALTDAHLPVAENGATLPVTSSERVVGTTEGVTAPVVSGSTTGIGPLSDEERATATPENAAALNDPAVPVAPETGSEPAQAGVEPVTPEAQVNDPALAEPNATAGNATAPVEVKNPLSLPPEALAQGRTDFLNGQWRAGAGIQDQRTGKPLSLNYQIKDGKGEVQMVRGDGVSCRGAVNAAIQAGKLAINNQGEAQCTDGSVYQMPEIVCAPGAKSVADCKGSYGTSTLFPLSMKQEASN

SEQ ID NO: 2033 - protein, 888 aa, Kosakonia cowanii
MNSINSKQIIQGWQGVERGAGEAIEWINAVRQDAPRLNTEADRLTINLRRSRNKARRLALAAAKPMTIGFFGLSQAGKSYLISALAAGENGKLETRLGGKQLDFLTHINPPGGGKEATGLVTRFSRRQVGGDERWPVTLQLFSEIEMGKILANAFIHDFNQEKFDWQYDEGRINDLLASLTKRRRPTRVAGISEDDVVSLWDYLSRHAEKSQSRLALHYWPQAITLAPWLTPEDRGQLFSVLWGEVAELTEAYIRFAQTLHRLGGAQEVWAPLSTLVSEENGLLVQRDSIMNVDMLERLNKETDIRIEVCPVVEGLAAAPVTLSLAELTALTVELHIPLVSSTREPLFETVDLLDFPGYRGRLGVESMDDIRRAVNSEESNPLAQLILRGKVAYLFERYTENQEMNVLVVCTASTKQSDVKEVGGVLDEWIRYTQGADAEARGRRLPGLIWALTMFDLRISQGLSQEEAILRQSWGLGGMIKMAMTERFGQYKWMQEWQRGQAFNNTFLVRKPRQQTPFIRISDGNEAAFSEENLPQLQLMRKTFLEDEAVNRYIASPDEAWDAMLELNDGGMRRMADYLSTVARPEVKLERIAEQLQEIRDELIEGGLGNWYQPDGEEDAAKKAQIARDILDVLKKRSGMHGELLLRLVPTRRDLQALYLQQTTLPVQEETPEELDIFDIGVGAAFGAEAPAATTYSHEIAFAHQSVQHWINHLRGLSESPALLNYINLPRPIIDALADELITALLRLRIEEKLVEAMTNTEQAGVLLEQMVDRQVSRILHVMGDFITWLGYLEMPAAKRPTRLNMPEQHIFTRPSQCDSVVWKDDERLARLTPQQLNYTAMFIIDWLVGLESLITENAGHSAGREISVAQNEKLGAIIRQIQTSQE

SEQ ID NO: 2034 - protein, 566 aa, Kosakonia cowanii
MKPVKRLYLSGDEVHAADVNIVLELSNCGRGFITAATEQDYTGKMVRLDIGYGESLFRWFTGYVERSQPAEKGFSRLFVRELSGVFEKLWPCSFQHPTLRDITAWLTENSGLTVAVPDAGYSDKPVPHFTHSGTGFQLLNNLGKAFGVADYLWYQLPDGSLYTGGAEKSLFAARPVDIPHEFSQAAAGGNSMTLPMIQTMRPGVEMNGERVTKVSLTGDTMVITWTPRDKATGAPLQKTPAQRQIESHFPELASGMHLPKFARVMAASEPANSGNFADPFRPRYAVDVQLLDADGKPDSGTPVYSAVPLPVPMAGNDSGMFQFPPEGTLVEVAFTGGRPDKPFVRQTVPEGTSLPDVKPGEQLQQQRAEVSQRVTQGGDWERQTDQSIRETSMSRHVQADTETREMVTRETTIKATDKTTVLGTATLMAGHIQHVTSGDYAMATGGKFVASVTGDAETEIAGKQSTKVTGGISIETSGALTEKIATLRKSVAAGGQQLMGATVHIGSESINALAMMLDTIDLLAELAQQCASHTHPGTGTPVSASAFTQVAARAGQTRSKYDKIIA

SEQ ID NO: 2035 - protein, 565 aa, Kosakonia cowanii
MKPVKRLYLSGDEVHAADVNIVLELSSCGRGFITAATEQDYTGKMVRLDIGYGESLFRWFTGYVERSQPAEKGFSRLFVRELSGVFEKLWPCSFQHPTLRDITAWLTENSGLTVAVPDAGYSDKPVPHFTHSGTGFQLLNNLGKAFGVADYLWYQLPDGSLYTGGAEKSLFAARPVDIPHEFSQAAAGGNSMTLPMIQTMRPGVEMNGERVTKVSLTGDTMVITWTPRDKATGAPLQKTPAQRQIESHFPELASGMHLPKFARVMAASEPASSGNFADPFRPRYAVDVQLLDADGKPDSGTPVYSAVPLPVPMAGNDSGMFQFPPEGTLVEVAFTGGRPDKPFVRQTVPEGTSLPDVKPGEQLQQQRAEVSQRVTQGGDWERQTDQSIRETSMSRHVQADTETREMVTRETTIKATDKTTVLGTATLMAGHIQHVTSGDYAMATGGKYVASVTGDAETEIAGKQSTKVTGGISIETSGALTEKIAALRKSVAAGQQLMGATVHIGSESINALTMMLDTIDLLAELAQQCASHTHPGTGTPVSASAFTQVAARAGQTRSKYQKIIA

SEQ ID NO: 2036 - protein, 426 aa, Kosakonia cowanii
MIRITRIVKPSVELTDYAASFSPFRTLLETYLPASIQNLYARPVIADDGAVEWYSDINGQPRRLLDLSETEQSRARTVLEQRLDSVRALHQKLAQNGSEPETMLRLLQAATHSPAPEQVWVIDGHPVIVPPAEGAPRAAAAATTAAAVSRRRWWPWLLLLALLIALILLLLSRCSPPHETAAPVTPVPPAVSPGEPVKPETTPAPHAPVKPTKAVCPAQRTQQQAPEMVVIMDASGSMAITMDATQDELISWNLGKYVENIEREPRRISLARNAAKGIIDTIPRDMNISLVAAENCRQVSLSPSFPFAQRSALKKRIEGIQPVGKTPLAEALALAGKKVDGVNRDAIILLVSDGDETCGGDPCQVARELKKSKPRLQVNVVDIMSTGAGNCIASSTGGKVFAVNNTREFKQIMKKAMQEYIPEGCE

SEQ ID NO: 2037 - protein, 468 aa, Kosakonia cowanii
MKEMFLCSDKLNKYQSMGENGQAVHISALQLRETLRLRKQSAAADVLAIPQISEHGERVDWYAPFSGDVIPWSAATESERQSALAQLETTQATLRQLSQDFAQSNQPEQQLFGKLLEKTLQFPDPEHVWLVNGKPVISFWGFVNARHQARIDPLDCLRPPKPVTPAAPLHSAPPVNEPLVTPPKRRGWWILPAWLCWLLPLLLLALLLLWLLRGCVPGVTIPGFSVEKPALPDVHLPVAENGATLPVTSSERIVGTTEGVTAPVVSGSTTGIVPLSDEERATAAPENAAALNDPAVPVAPETGSEPAQAGVEPVTPEAQVNDPALAEPNATAGNATAPVEVKNPLSLPPEALAQGRTDFLNGQWRAGAGIQDQRTGKPLSLNYQIKDGKGEVQMVRGDGVSCRGAVNAAIQAGKLAINNQGEAQCTDGSVYQMPEIVCAPGAKSVADCKGSYGTSTLFPLSMKQEASN

SEQ ID NO: 2038 - protein, 1000 aa, Kosakonia cowanii
MLAELTDFKKQVKLIRDSGIQFLDFAFSLPARKAYGEFLRQQGEGAVLRLIYNERDDKFQVPTPDGETPRNAEPEYALAIEDSLSLYAGIWLPLPFFRFNPPGGFSHGPTNWSRVQFHQLPEPDEKGNTWRATLIFDTKIFPDREHTQYLAPGEDDVRSGAGFALACLPHQMGDFLTLPWIEEWLNDIYTRQAHAVLRQHPEDTEEKLVLKEHQAHFLNLLEVLKKTIAIPEVQLNDVKIRDTAIPVDLVLDIGNSRSCGVLIEEHAADNKGLSQLYQLQLRDLSQPQFVYNEPFESRLEFAQAEFGKQDFSSKSGRSDAFTWPTIGRVGGEAFRMAAQRLGTEGSTGLSSPKRYLWDDQPYSPGWRFSQAFVKSDREPLATAAPLLYMLNDHGKLLIRLNEDERMPVFSPVYSRSSLMTMMLSEVLSQALMQINSPAQRLKMSHASHPRRLRNVILTVPPAMPKPERAIFEACMHDAIRLVWKSLEWEEMDYDGEESGNAKQPHPGVHVKWDEATCGQLVYLYNETQTNFGGRTDEFFAATRRPDNQQAEGEQRSLKIASIDIGGGTTDLVITRYTLDDGKGINVRITPKQLFREGFKVAGDDILLDVIRLYLQPAVKAAMIKVGHSDIAAESMMSQLFGSEAIEAGKQVLRQQLTLQIFSPLALAILHRYEEYKPESGREVLNYTFRELLTGTTPTAKVQDYVNDVVRTGQLASEALFSLLDVPLEVDLARLHNEFIDPRSGRMNICHSLRALCEVLWHYNCDVLLLTGRPSRLPGIQALIRQLQPVPPTRVLPLHGYETGGWYPFNKKGCIDDPKSTAVVGAMLCLLAEKSRLNNFYFRAANFTAYSTIRYLGMLDGNNVIKDSNVFYSDIDLDAADFQLPQGQPFEARGEVRIGFRQLDNERWPASSLYTLKINNPNLASELAGDAVMRIELMAEQGRARNGEEAVSPERFRIESLEMEHARRNYSRKDVTFQLNTMVGNGMGESQYWLDSGSIKS

SEQ ID NO: 2039 - protein, 888 aa, Kosakonia cowanii
MNSINSKQIIQGWQGVERGAGEAIEWINAVRQDAPRLNTEADRLTINLRRSRNKARRLALAAAKPMTIGFFGLSQAGKSYLISALAAGENGKLETRLGGKQLDFLTHINPPGGGKEATGLVTRFSRRQVGGDERWPVTLQLFSEIEMGKILANAFIHDFNQEKFDWQYDEGRINDLLASLTKRRRPTRVAGISEDDVVSLWDYLSRHAEKSQSRLALHYWPQAITLAPWLTPEDRGQLFSVLWGEVAELTEAYIRFAQTLHRLGGAQEVWAPLSTLVSEENGLLVQRDSIMNVDMLERLNKETDIRIEVCPVVEGQAAAPVTLSLAELTALTVELHIPLVASTREPLFETVDLLDFPGYRGRLGVESMDDIRRAVNSEESNPLAQLILRGKVAYLFERYTENQEMNVLVVCTASTKQSDVKEVGGVLDEWIRYTQGADAEARGRRLPGLIWALTMFDLRISQGLSQEEAILRQSWGLGGMIKMAMTERFGQYKWMQEWQRGQAFNNTFLVRKPRQQTPFIRISDGNEAAFSEENLPQLQLMRKTFLEDEAVNRYIASPDEAWDAMLELNDGGMRRMADYLSTVARPEVKLERIAEQLQEIRDELIEGGLGNWYQPDGEEDAAKKAQIARDILDVLKKRSGMHGELLLRLVPTRRDLQALYLQQTTLPVQEEAPEELDIFDIGVGAAFGAEAPAATTYSHEIAFAHQSVQHWINHLRGLSESPALLNYINLPRPIIDALADELITALLRLRVEEKLVEAMTNTEQAGVLLEQMVDRQVSRILHVMGDFITWLGYLEMPAAKRPTRLNMPDQHIFTRPSQCDSVVWKDDERLARLTPQQLNYTAMFIIDWLVGLESLITENAGHSAGREISVAQNEKLGAIIRQIQTSQE

SEQ ID NO: 2040 - protein, 426 aa, Kosakonia cowanii
MIRITRIVKPSVELTDYAASFSPFRTLLETYLPASIQNLYARPVIADDGAVEWYSDINGQPRRLLDLSETEQSRARTVLEQRLDSVRALHQKLAQNGSEPETMLRLLQAATHSPAPEQVWVIDGHPVIVPPAEGAPRAAAAATTAAAVSRRRWWPWLLLLALLIALILLLLSRCSPLHETAAPVTPAPPAVTPGEPVKPETTPAPHAPVKPTKAVCPAQRTQQQAPEMVVIMDASGSMAITMDATQDELISWNQGKYVENIEREPRRISLARNAAKGIIDTIPRDMNISLVAAENCRQVSLSPSFPFAQRSALKKRIEGIQPVGKTPLAEALALAGKKVDGVNRDAIILLVSDGDETCGGDPCQVARELKKSKPRLQVNVVDIMSTGAGNCIASSTGGKVFAVNNTREFKQIMKKAMQEYIPEGCE

SEQ ID NO: 2041 - protein, 468 aa, Kosakonia cowanii
MKEMFLCSDKLNKYQSMGENGQAVHISALQLRETLRLRKQSAAADVLAIPQISEHGERVDWYAPFSGDVIPWSAATESERQSALAQLETTQATLRQLSQDFAQSNQPEQQLFGKLLEKTLQFPDPEHVWLVNGKPVISFWGFVNARHQARIDPLDCLRPPKPVTPAAPLHSAPPVNEPLVTPPKRRGWWILPAWLCWLLPLLLLALLLLWLLRGCVSGVTIPGFSVEQPALPDARLPVAENGATLPVTSSERVVGTTEGVTAPVVSGSTTGIVPLSDEERATAAPENASALNDPAVPVAPETGSEPAQAGVEPVTPEAQVNDPALAEPNATAGNATAPVEVKNPLSLPPEALAQGRTDFLNGQWRAGAGIQDQRTGKPLSLNYQIKDGKGEVQMVRGDGVSCRGAVNAAIQAGKLAINNQGEAQCTDGSVYQMPEIVCAPGAKSVADCKGSYGTSTLFPLSMKQEASN

SEQ ID NO: 2042 - protein, 1000 aa, Kosakonia cowanii
MLAELTDFKKQVKLIRDSGIQFLDFAFSLPARKAYGEFLRQQGEGAVLRLIYNERDDKFQVPTPDGETPRNAEPEYALAIEDSLSLYAGIWLPLPFFRFNPPGGFSHGPTNWSRVQFHQLPEPDEKGNTWRATLIFDTKIFPDREHTQYLAPGEDDVRSGAGFALACLPHQMGDFLTLPWIEEWLNDIYTRQAHAVLRQHPEDTEEKLGLKEHQAHFLNLLEVLKKTIVIPEVQLNDVKIRDTAIPVDLVLDIGNSRSCGVLIEEHAADNKGLSQLYQLQLRDLSQPQFVYNEPFESRLEFAQAEFGKQDFSSKSGRSDAFTWPTIGRVGGEAFRMAAQRLGTEGSTGLSSPKRYLWDDQPYSPGWRFSQAFVKSDREPLATAAPLLYMLNDHGKLLIRLNEDERMPVFSPVYSRSSLMTMMLSEVLSQALMQINSPAQRLKMSHASHPRRLRNVILTVPPAMPKPERAIFEACMHDAIRLVWKSLEWEEMDYDGEESGNAKQPHPGVHVKWDEATCGQLVYLYNETQTNFGGRTDEFFAATRRPDNQQAEGEQRSLKIASIDIGGGTTDLVITRYTLDDGKGINVRITPKQLFREGFKVAGDDILLDVIRLYLQPAVKAAMMKVGHSDIAAESMMSQLFGSEAIEAGKQVLRQQLTLQIFSPLALAILHRYEEYKPESGREVLNYTFRELLTGTTPTAKVQDYVNDVVRTGQLASEALFSLLDVPLEVDLARLHNEFIDPRSGRMNICHSLRALCEVLWHYNCDVLLLTGRPSRLPGIQALIRQLQPVPPTRVLPLHGYETGGWYPFNKKGCIDDPKSTAVVGAMLCLLAEKSRLNNFYFRAANFTAYSTIRYLGMLDGNNVIKDSNVFYSDIDLDAADFQLPQGQPFEARGEVRIGFRQLDNERWPASSLYTLKINNPNLASELAGDAVMRIELMAEQGRARNGEEAVSPERFRIESLEMEHARRNYSRKDVTFQLNTMVGNGMGESQYWLDSGSIKS

SEQ ID NO: 2043 - protein, 888 aa, Kosakonia cowanii
MNSINSKQIIQGWQGVERGAGEAIEWINAVRQDAPRLNTEADRLTINLRRSRNKARRLALAAAKPMTIGFFGLSQAGKSYLISALAAGENGKLETRLGGKQLDFLTHINPPGGGKEATGLVTRFSRRQVGGDERWPVTLQLFSEIEMGKILANAFIHDFNQEKFDWQYDEGRINDLLASLTKRRRPTRVAGISEDDVVSLWDYLSRHAEKSQSRLALHYWPQAITLAPWLTPEDRGQLFSVLWGEVAELTEAYIRFAQTLHRLGGAQEVWAPLSTLVSEENGLLVQRDSIMNVDMLERLNKETDIRIEVCPVVEGQAAAPVTLSLAELTALTVELHIPLVASTREPLFETVDLLDFPGYRGRLGVESMDDIRRAVNSEESNPLAQLILRGKVAYLFERYTENQEMNVLVVCTASTKQSDVKEVGGVLDEWIRYTQGADAEARGRRLPGLIWALTMFDLRISQGLSQEEAILRQSWGLGGMIKMAMTERFGQYKWMQEWQRGQAFNNTFLVRKPRQQTPFIRISDGNEAAFSEENLPQLQLMRKTFLEDEAVNRYIASPDEAWDAMLELNDGGMRRMADYLSTVARPEVKLERIAEQLQEIRDELIEGGLGNWYQPDGEEDAAKKAQIARDILDVLKKRSGMHGELLLRLVPTRRDLQALYLQQTTLPVQEEAPEELDIFDIGVGAAFGAEAPAATTYSHEIAFAHQSVQHWINHLRGLSESAALLNYINLPRPIIDALADELITALLRLRIEEKLVEAMTNTEQAGVLLEQMVDRQVSRILHVMGDFITWLGYLEMPAAKRPTRLNMPDQHIFTRPSQCDSVVWKDDERLARLTPQQLNYTAMFIIDWLVGLESLITENAGHSAGREISVAQNEKLGAIIRQIQTSQE

SEQ ID NO: 2044 - protein, 426 aa, Kosakonia cowanii
MIRITRIVKPSVELTDYAASFSPFRTLLETYLPASIQNLYARPVIADDGAVEWYSDINGQPRRLLDLSETEQSRARAVLEQRLDSVRALHQKLAQNGSEPETMLRLLQAATHSPAPEQVWVIDGHPVIVPPAEGAPRAAAAATTAAAVSSRRWWPWLLLLALLIALILLLLSRCSPLHETAAPVTPAPPAVTPGEPVKPETTPAPHAPVKPTKAVCPAQRTQQQAPEMVVIMDASGSMAITMDATQDELISWNQGKYVENIEREPRRISLARNAAKGIIDTIPRDMNISLVAAENCRQVSLSPSFPFAQRSALKKRIEGIQPVGKTPLAEALALAGKKVDGVNRDAIILLVSDGDETCGGDPCQVARELKKSKPRLQVNVVDIMSTGAGNCIASSTGGKVFAVNNTREFKQIMKKAMQEYIPEGCE

SEQ ID NO: 2045 - protein, 468 aa, Kosakonia cowanii
MKEMFLCSDKLNKYQSMGENGQAVHISALQLRETLRLRKQSAAADVLAIPQISEHGERVDWYAPFSGDVIPWSAATESERQSALAQLETTQATLRQLSQDFAQSNQPEQQLFGKLLEKTLQFPDPEHVWLVNGKPVISFWGFVNARHQARIDPLDCLRPPKPVTPAALLHSAPPVNEPLVTPPKRRGWWILPAWLCWLLPLLLLALLLLWLLRGCVPGVTIPGFSVEKPALPDAHLPVAENGATLPVTSSERVVGTTEGVTAPVVSGSTTGIGTLSDEERATAAPENAAALNDPAVPVAPETGSEPAQAGVEPVTPEAQVNDPALAEPNATAGNATAPVEVKNPLSLPPEALAQGRTDFLNGQWRAGAGIQDQRTGKPLSLNYQIKDGKGEVQMVRGDGVSCRGAVNAAIQAGKLAINNQGEAQCTDGSVYQMPEIVCAPGAKSVADCKGSYGTSTLFPLSMKQEASN

SEQ ID NO: 2046 - protein, 1000 aa, Kosakonia cowanii
MLAELTDFKKQVKLIRDSGIQFLDFAFSLPARKAYGEFLRQQGEGAVLRLIYNERDDKFQVPTPDGETPRNAEPEYALAIEDSLSLYAGIWLPLPFFRFNPPGGFSHGPTNWSRVQFHQLPEPDEKGNTWRATLIFDTKIFPDREHTQYLAPGEDDVRSGAGFALACLPHQMGDFLTLPWIEEWLNDIYTRQAHAVLRQHPEDTEEKLVLKEHQAHFLNLLEVLKKTIAIPEVQLNDVKIRDTAIPVDLVLDIGNSRSCGVLIEEHAADNKGLSQLYQLQLRDLSQPQFVYNEPFESRLEFAQAEFGKQDFSSKSGRSDAFTWPTIGRVGGEAFRMAAQRLGTEGSTGLSSPKRYLWDDQPYSPGWRFSQAFVKSDREPLATAAPLLYMLNDHGKLLIRLNEDERMPVFSPVYSRSSLMTMMLSEVLSQALMQINSPAQRLKMSHASHPRRLRNVILTVPPAMPKPERAIFEACMHDAIRLVWKSLEWEEMDYDGEESGNAKQPHPGVHVKWDEATCGQLVYLYNETQTNFGGRTDEFFAATRRPDNQQAEGEQRSLKIASIDIGGGTTDLVITRYTLDDGKGINVRITPKQLFREGFKVAGDDILLDVIRLYLQPAVKAAMMKVGHSDIAAESMMSQLFGSEAIEAGKQVLRQQLTLQIFSPLALAILHRYEEYKPESGREVLNYTFRELLTGTTPTAKVQDYVNDVVRTGQLASEALFSLLDVPLEVDLARLHNEFIDPRSGRMNICHSLRALCEVLWHYNCDVLLLTGRPSRLPGIQALIRQLQPVPPTRVLPLHGYETGGWYPFNKKGCIDDPKSTAVVGAMLCLLAEKSRLNNFYFRAANFTAYSTIRYLGMLDGNNVIKDSNVFYSDIDLDAADFQLPQGQPFEARGEVRIGFRQLDNERWPASSLYTLKINNPNLASELAGDAVMRIELMAEQGRARNGEEAVSPERFRIESLEMENARRNYSRKDVTFQLNTMVGNGMGESQYWLDSGSIKS

SEQ ID NO: 2047 - protein, 888 aa, Kosakonia cowanii
MNSINSKQIIQGWQGVERGAGEAIEWINAVRQDAPRLNTEADRLTIKLRRSRNKARRLALAAAKPMTIGFFGLSQAGKSYLISALAAGENGKLETRLGGKRLDFLTHINPPGGGKEATGLVTRFSRRQVGGDERWPVTLQLFSEIEMGKILANAFIHDFNQEKFDWQYDEGRISDLLNSLAKRRRPTRVAGISEDEVVSLWDYLSRHAEKSQSRLALHYWPQAITLAPWLTPEDRGQLFSVLWGEVAGLTEAYIRFAQTLHRLGGAQEVWAPLSTLVSEENGLLVQRDSIMNVDMLERLNTETDIRIEVCPVVEGQAAAPVTLSLAELTALTVELHIPLVASTREPLFETVDLLDFPGYRGRLGVESMDDTRRAVNNEESNPLAQLILRGKVAYLFERYTENQEMNVLVVCTASTKQSDVKEVGGVLDEWIRYTQGADAEARGRRLPGLIWALTMFDLRISQGLSQEEAILRQSWGLGGMIKMAMTERFGQYKWMQEWQRGQAFNNTFLVRKPRQQTPFIRISDGNEAAFSEENLPQLQLMRKTFLEDEAVNRYIASPDEAWDAMLELNDGGMRRMADYLSTVARPEVKLERIAEQLQEIRDELIEGGLGNWYQPDGEEDAAKKAQIARDILDVLKKRSGMHGELLLRLVPTRRDLQALYLQQTTLPVQEEAPEELDIFDIGVGAAFGAEAPAATTYSHEIAFAHQSVQHWINHLRGLSESPALLNYINLPRPIIDALADELITALLRLRVEEKLVEAMTNTEQAGVLLEQMVDRQVSRILHVMGDFITWLGYLEMPAAKRPTRLNMPDQHIFTRPSQCDSVVWKDDERLARLTPQQLNYTAMFIIDWLVGLESLITENAGHSAGREISVAQNEKLGAIIRQIQTSQE

SEQ ID NO: 2048 - protein, 426 aa, Kosakonia cowanii
MIRITRIVKPSVELTDYAASFSPFRTLLETYLPASIQNLYARPVIADDGAVEWYSDINGQPRRLLDLSETEQSRARALLEQRLDSVRALHQKLAQNGSEPETMLRLLQAATHSPAPEQVWVIDGHPVIVPPAEGAPRAAAAATTAAAVSSRRWWPWLLLLALLIALILLLLSRCSPLHETAAPVTPAPPAVTPGEPVKPETTPAPHAPVKPTKAVCPAQRTQQQAPEMVVIMDASGSMAITMDATQDELISWNQGKYVENIEREPRRISLARNAAKGIIDTIPRDMNISLVAAENCRQVSLSPSFPFAQRSALKKRIEGIQPVGKTPLAEALALAGKKVDGVNRDAIILLVSDGDETCGGDPCQVARELKKSKPRLQVNVVDIMSTGAGNCIASSTGGKVFAVNNTREFKQIMKKAMQEYIPEGCE

SEQ ID NO: 2049 - protein, 468 aa, Kosakonia cowanii
MKEMFLCSDKLNKYQSMGENGQAVHISALQLRETLRLRKQSAAADVLAIPQISEHGERVDWYAPFSGDVIPWSAATESERQSALAQLETTQATLRQLSQDFAQSNQPEQQLFGKLLEKTLQFPDPEHVWLVNGKPVISFWGFVNARHQARIDPLDCLRPPKPVTPAAPLHSAPPVNEPLVTPPKRRGWWILPAWLCWLLPLLLLAFLLLWLLRGCVPGVTIPGFSVEKPALPDVHLPVAENGATLPVTSSERVVGTTEGVTAPVVSGSTTGIGPLSDEERATAAPENAAALNDPAVPVAPETGSEPAQAGVEPVTPEAQVNDPALAEPNATAGNATAPVEVKNPLSLPPEALAQGRTDFLNGQWRAGAGIQDQRTGKPLSLNYQIKDGKGEVQMVRGDGVSCRGAVNAAIQAGKLAINNQGEAQCTDGSVYQMPEIVCAPGAKSVADCKGSYGTSTLFPLSMKQEASN

SEQ ID NO: 2050 - protein, 1000 aa, Kosakonia cowanii
MLAELTDFKKQVKLIRDSGIQFLDFAFSLPARKAYGEFLRQQGEGAVLRLIYNERDDKFQVPTPDGETPRNAEPEYALAIEDSLSLYAGIWLPLPFFRFNPPGGFSHGPTNWSRVQFHQLPEPDEKGNTWRATLIFDTKIFPDREHTQYLAPGEDDVRSGAGFALACLPHQMGDFLTLPWIEEWLNDIYTRQAHAVLRQHPEDTEEKLGLKEHQAHFLNLLEVLKKTIVIPEVQLNDVKIRDTAIPVDLVLDIGNSRSCGVLIEEHAADNKGLSQLYQLQLRDLSQPQFVYNEPFESRLEFAQAEFGKQDFSSKSGRSDAFTWPTIGRVGGEAFRMAAQRLGTEGSTGLSSPKRYLWDDQPYSPGWRFSQAFVKSDREPLATAAPLLYMLNDHGKLLIRLNEDERMPVFSPVYSRSSLMTMMLSEVLSQALMQINSPAQRLKMSHASHPRRLRNVILTVPPAMPKPERAIFEACMHDAIRLVWKSLEWEEMDYDGEESGNAKQPHPGVHVKWDEATCGQLVYLYNETQTNFGGRTDEFFAATRRPDNQQAEGEQRSLKIASIDIGGGTTDLVITRYTLDDGKGINVRITPKQLFREGFKVAGDDILLDVIRLYLQPAVKAAMMKVGHSDIAAESMMSQLFGSEAIEAGKQVLRQQLTLQIFSPLALAILHRYEEYKPESGREVLNYTFRELLTGTTPTAKVQDYVNDVVRTGQLASEALFSLLDVPLEVDLARLHNEFIDPRSGRMNICHSLRALCEVLWHYNCDVLLLTGRPSRLPGIQALIRQLQPVPPTRVLPLHGYETGGWYPFNKKGCIDDPKSTAVVGAMLCLLAEKSRLNNFYFRAANFTAYSTIRYLGMLDGNNVIKDSNVFYSDIDLDAADFQLPQGLPFEARGEVRIGFRQLDNERWPASSLYTLKINNPNLASELAGDAVMRIELMAEQGRARNGEEAVSPERFRIESLEMENARRNYSRKDVTFQLNTMVGNGMGESQYWLDSGSIKS

SEQ ID NO: 2051 - protein, 888 aa, Kosakonia cowanii
MNSINSKQIIQGWQGVERGAGEAIEWINAVRQDAPRLNTEADRLTINLRRSRNKARRLALAAAKPMTIGFFGLSQAGKSYLISALAAGENGKLETRLGGKQLDFLTHINPPGGGKEATGLVTRFSRRQVGGDERWPVTLQLFSEIEMGKILANAFIHDFNQEKFDWQYDEGRISDLLNSLAKRRRPTRVAGISEDEVVSLWDYLSRHAEKSQSRLALHYWPQAITLAPWLTPEDRGQLFSVLWGEVAELTEAYIRFAQTLHRLGGAQEVWAPLSTLVSEENGLLVQRDSIMNVDMLERLNKETDIRIEVCPVVEGQAAAPVTLSLAELTALTVELHIPLVASTREPLFETVDLLDFPGYRGRLGVESMDDIRRAVNSEESNPLAQLILRGKVAYLFERYTENQEMNVLVVCTASTKQSDVKEVGGVLDEWIRYTQGADAEARGRRLPGLIWALTMFDLRISQGLSQEEAILRQSWGLGGMIKMAMTERFGQYKWMQEWQRGQAFNNTFLVRKPRQQTPFIRISDGNEAAFSEENLPQLQLMRKTFLEDEAVNRYIASPDEAWDAMLELNDGGMRRMADYLSTVARPEVKLERIAEQLQEIRDELIEGGLGNWYQPDGEEDAAKKAQIARDILDVLKKRSGMHGELLLRLVPTRRDLQALYLQQTTLPVQEEAPEELDIFDIGVGAAFGAEAPAATTYSHEIAFAHQSVQHWINHLRGLSESPALLNYINLPRPIIDALADELITALLRLRVEEKLVEAMTNTEQAGVLLEQMVDRQVSRILHVMGDFITWLGYLEMPAAKRPTRLNMPDQHIFTRPSQCDSVVWKDDERLARLTPQQLNYTAMFIIDWLVGLESLITENAGHSAGREISVAQNEKLGAIIRQIQTSQE

1. A synthetic composition, comprising one or more endophytes heterologously disposed to a treatment formulation, wherein the endophytes comprise at least one tailocin gene cluster, and wherein the endophyte in the synthetic composition is capable of improving a trait of agronomic importance in a plant or plant element heterologously disposed to the synthetic composition.

2. The synthetic composition of claim 1, wherein:
(a) the at least one gene of the tailocin gene cluster comprises at a polynucleotide sequence that is at least 97% identical to SEQ ID NO. 287-933; and/or
(b) the one or more endophytes comprise a plasmid containing one or more genes of the tailocin gene cluster;
(c) are capable of producing one or more proteins having amino acid sequences are at least 97% identical to SEQ ID NOs. 1318-1922;
(d) are capable of producing one or more proteins having amino acid sequences are at least 99% identical to SEQ ID NOs. 1318-1922;
(e) are capable of producing one or more proteins whose amino acid sequence is an amino acid sequence selected from SEQ ID NOs. 1318-1922;
(f) comprise a plasmid comprising an open reading frame encoding a protein whose amino acid sequence is at least 97% identical to an amino acid sequence selected from SEQ IDs. 1318-1922;
(g) comprise a plasmid comprising an open reading frame encoding a protein whose amino acid sequence is at least 99% identical to an amino acid sequence selected from SEQ IDs. 1318-1922; or
(h) comprise a plasmid comprising an open reading frame encoding a protein whose amino acid sequence is an amino acid sequence selected from SEQ IDs. 1318-1922.

3. (canceled)

4. The synthetic composition of claim 2, wherein the one or more genes of the tailocin gene cluster comprise one more polynucleotide sequences that are at least 97% identical to SEQ ID NO. 287-933.

5.-10. (canceled)

11. A synthetic composition, comprising one or more endophytes heterologously disposed to a treatment formulation, wherein the endophytes comprise at least one polynucleotide sequence of having at least 97% identity to one or more of (i) SEQ IDs. 1-239, (ii) SEQ IDs. 240-253, (iii) SEQ IDs. 254-286, (iv) SEQ IDs. 934-1014, or (v) SEQ IDs. 1015-1089, and wherein the endophyte in the synthetic composition is capable of improving a trait of agronomic importance in a plant or plant element heterologously disposed to the synthetic composition.

12. The synthetic composition of claim 11, wherein the one or more endophytes:
(a) comprise a plasmid containing one or genes having at least 97% identity to one or more of SEQ IDs. 1-239;
(b) are capable of producing one or more proteins having amino acid sequences are at least 97% identical to SEQ ID NOs. 1090-1272;
(c) comprise a plasmid comprising an open reading frame encoding a protein whose amino acid sequence is at least 97% identical to an amino acid sequence selected from SEQ IDs. 1090-1272;
(d) comprise a plasmid containing one or genes having at least 97% identity to one or more of SEQ IDs. 240-253;
(e) are capable of producing one or more proteins having amino acid sequences are at least 97% identical to SEQ ID NOs. 1273-1285;
(f) comprise a plasmid comprising an open reading frame encoding a protein whose amino acid sequence is at least 97% identical to an amino acid sequence selected from SEQ IDs. 1273-1285;
(g) comprise a plasmid containing one or genes having at least 97% identity to one or more of SEQ IDs. 254-286;
(h) are capable of producing one or more proteins having amino acid sequences are at least 97% identical to SEQ ID NOs. 1286-1317;
(i) comprise a plasmid comprising an open reading frame encoding a protein whose amino acid sequence is at least 97% identical to an amino acid sequence selected from SEQ IDs. 1286-1317;
(i) comprise a plasmid containing one or genes having at least 97% identity to one or more of SEQ IDs. 934-1014;
(k) are capable of producing one or more proteins having amino acid sequences are at least 97% identical to SEQ ID NOs. 1923-1981;
(l) comprise a plasmid comprising an open reading frame encoding a protein whose amino acid sequence is at least 97% identical to an amino acid sequence selected from SEQ IDs. 1923-1981;
(m) comprise a plasmid containing one or genes having at least 97% identity to one or more of SEQ IDs. 1015-1089;
(n) are capable of producing one or more proteins having amino acid sequences are at least 97% identical to SEQ ID NOs. 1982-2051; or
(o) comprise a plasmid comprising an open reading frame encoding a protein whose amino acid sequence is at least 97% identical to an amino acid sequence selected from SEQ IDs. 1982-2051.

13.-50. (canceled)

51. A synthetic composition, comprising one or more endophytes heterologously disposed to a treatment formulation, wherein the endophytes comprise one or more of:
(a) a flagellin gene having at least 97% identity to one or more of (i) SEQ IDs. 1-8 or 14-16, (ii) SEQ IDs. 9, 55, 56, 130-133, (iii) SEQ IDs. 9, 11-13, 17-18, 20-23, or (iv) SEQ IDs. 10 or 19,
(b) an O-antigen biosynthesis gene having at least 97% identity to one or more of SEQ IDs. 240-243,
(c) a pseudaminic acid biosynthesis gene having at least 97% identity to one or more of (i) SEQ IDs. 256-262 or (ii) SEQ IDs. 254-255,
(d) a gene of a tailocin gene cluster having at least 97% identity to one or more of (i) SEQ IDs. 288-342, (ii) SEQ IDs. 288-289 or 566-605, (iii) SEQ IDs. 287, 343, 382-390, or (iv) SEQ IDs. 375-381,
(e) a gene of a Type IV secretion system having at least 97% identity to one or more of (i) SEQ IDs. 938-941, (ii) SEQ IDs. 974-977, (iii) SEQ IDs. 934-937, or (iv) SEQ ID. 944, and
(f) a gene of a Type IV secretion system putative effector having at least 97% identity to one or more of (i) SEQ IDs. 1018-1022, (ii) SEQ IDs. 1054-1057, or (iii) SEQ IDs. 1015-1017 or 1024, and
wherein the endophyte in the synthetic composition is capable of improving a trait of agronomic importance in a plant or plant element heterologously disposed to the synthetic composition.

52.-54. (canceled)

55. A synthetic composition, comprising one or more endophytes heterologously disposed to a treatment formulation, wherein:
(a) the endophytes comprise one or more polynucleotide sequences at least 97% identical to one or more of SEQ ID NOs. 1-8, and the one or more endophytes are capable of producing one or more proteins whose amino acid sequences are selected from SEQ ID NOs. 1090-1096, wherein the endophyte in the synthetic composition is capable of improving biotic stress tolerance in an environment containing pathogenic Fusarium in a plant or plant element heterologously disposed to the synthetic composition;
(b) the endophytes comprise one or more polynucleotide sequences at least 97% identical to one or more of SEQ ID NOs. 9-13, 254, 255, 287, 934-937, 1015-1017, 1-8, 24-28, 75-85, 365-374, 442-452, 959-962, 1023, 1038-1041, and the one or more endophytes are capable of producing one or more proteins whose amino acid sequences are selected from SEQ ID NOs. 1097-1103, 1286, 1287, 1318, 1319, 1923-1926, 1982-1984, 1090-1096, 1113, 1114, 1149-1157, 1402-1409, 1471-1483, 1946-1947, 1990, 2005, 2006, wherein the endophyte in the synthetic composition is capable of improving biotic stress tolerance in an environment containing pathogenic Rhizocotina in a plant or plant element heterologously disposed to the synthetic composition; or
(c) the endophytes comprise one or more polynucleotide sequences at least 97% identical to one or more of SEQ ID NOs. 1-18, 240-243, 254-262, 287-364, 934-943, 1015-1022, 19-74, 365-374, 391-441, 945-958, 1023, 1025-1037, and the one or more endophytes are capable of producing one or more proteins whose amino acid sequences are selected from SEQ ID NOs. 1090-1106, 1112, 1273-1276, 1286-1294, 1318-1401, 1923-1934, 1982-1989, 1107-1111, 1113-1148, 1402-1409, 1426-1470, 1936-1945, 1990, 1992-2004, wherein the endophyte in the synthetic composition is capable of improving biotic stress tolerance in an environment containing pathogenic Pythium in a plant or plant element heterologously disposed to the synthetic composition.

56.-57. (canceled)

58. The synthetic composition of claim 1, wherein the synthetic composition additionally comprises one or more plant elements.

59. The synthetic composition of claim 58, wherein the one or more plant elements are:
(a) seeds;
(b) monocots; or
(c) dicots.

60. (canceled)

61. The synthetic composition of claim 59, wherein:
(a) the dicots are selected from the group consisting of cotton, tomato, lettuce, peppers, cucumber, endive, melon, potato, cannabis, and squash;
(b) the dicots are legumes; or
(c) the monocot is a cereal.

62. (canceled)

63. The synthetic composition of claim 61, wherein:
(a) the legume is soybean; or
(b) the cereal is a wheat and wherein the wheat is winter wheat.

64.-65. (canceled)

66. The synthetic composition of claim 1, wherein the synthetic composition is formulated such that the endophyte can be applied to seeds a rate of 0.65 mL/kg seed.

67. The synthetic composition of claim 59, wherein the synthetic composition comprises at least 1E+03 endophytes per seed, at least 1E+04 CFU per seed, at least 1E+05 CFU per seed, at least 1E+06 CFU per seed, at least 1E+07 CFU per seed, or at least 1E+08 CFU per seed.

68. The synthetic composition of claim 1, wherein the one or more endophytes are capable of improving one or more traits of agronomic importance in the plant element or plant derived from the plant element relative to a reference plant or plant derived from a reference plant element.

69. The synthetic composition of claim 68, wherein the one or more traits of agronomic importance comprise one or more of biotic stress tolerance, shoot fresh weight, yield, plant height, shoot weight, and or root weight.

70. The synthetic composition of claim 69, wherein the biotic stress is a growth environment comprising one or more pests or pathogens.

71. The synthetic composition of claim 70, wherein the one or more pests or pathogens is a Dreschlera, Bipolaris, Pythium, Rhizoctonia, or Fusarium species.

72. The synthetic composition of claim 1, wherein:
(a) the one or more endophytes are of the genus Kosakonia; or
(b) the one or more endophytes are of the genus and species Kosakonia cowanni.

73. (canceled)

74. The synthetic composition of claim 1, wherein the treatment formulation comprises one or more of:
(a) liquid state fermentation broth;
(b) one or more solid carrier;
(c) one or more adherent;
(d) talc and mineral oil;
(e) kaolin clay, a dispersant, and a surfactant; or
(f) a sugar.

75.-79. (canceled)

80. A method comprising applying the synthetic composition of claim 1 to a plant element.
